United States Patent Application Publication US 2004/0253606 A1 - sequence listing, part 7

SEQ ID NO: 7218 - DNA, 529 bp, Homo sapiens
ttttttttttttttttttttttttttttttttttttttctgagtgagaatgtctttattatccttataatctgctctacaggtaaaacattaacaaattttttcccttttatttttagttgacatgtaataattgtacaaatttatggaatacagagtggtatttcaacacatgtatacaatgtatactgatcaaaccaggctaattagcatttttaatagaaccatacttatctgtggaaaggcagctacggcctaccatgcctgatgaagaaactggccggaagaagctaggtagtctgtaagcatgttactttatatcctaacagtaaggtgggatggagtgtacccaaacatccaatggaagccatcagtagcttgctatatacaatgcatgtaaaattctaccaagtgacacaggactcactgcaacatttgcatggactctggcttttgaacctctgtaggctgaaaaattgatgggaagctgaaattctgcaaaggtgcccttaccgaaatcatgttgccaa

SEQ ID NO: 7219 - DNA, 1267 bp, Homo sapiens
tcggcacgagggcttcccacaaactggggaggaaaactgagacctcctggtcacccgccgccgggccttttagaaactcccacaagctctgccttccctccctggtcctcttcagaccccctcttagttcttcgcggctaacggctcgcgctcggggccgggtgtggagctggaacagagggctggcaaggcgcgcatgcgcaccgagggtggagccgctgagcacagaaccggaaacttagagacaaagttcggagccccgcccccgccgcgcgccgctgagttgtctggccccgccgacccacggcccacgaccgaccgacccacgaatcggcccggccgtcgcgtgcaccatgtctggctcctccagcgtcgccgctatgaagaaagtggttcaacagctccggctggaggccggactcaaccgcgtaaaagtttcccaggcagctgcagacttgaaacagttctgtctgcagaatgctcaacatgaccctctgctgactggagtatcttcaagtacaaatcccttcagaccccagaaagtctgttcctttttgtagtaaaatgaatctttcaaaggtttcccaaaccactccttatgatccagtgaatattcaagagagctacatttgaagcctgtacaaaagcttatccctgtaacacatgtgccataatatacaaacttctactttcgtcagtccttaacatctacctctctgaattttcatgaatttctatttcacaagggtaattgttttatatacactggcagcagcatacaataaaacttagtatgaaactttaaaaaaaaaaaaaaaaaaaaaaaaaaaaaaaaaaaaaaaaaaaccccggaggacatatagaggaggggcgggaaaaggggcgtatagacaggggaaatgggaaaaaagtgatcacgagaccccaatttttgtacaaggggggaaaaacagaggggccccaaaagagagcgcgcgataacgtgcgcgaaagaccggagtcaaccgtttattgtctgctcaactacaaagagagcgacacacacactacgcacacaaaaaagggagacacacacatgaccaacaacaagggacacaacaaaaacacacagcccaacaacaaccaaaccaaacaaagagggacaaaagagagaagaaagaacgaaaaaaacagagaaaaaacaacagaaagagaaacaaaaaaaagagcaagaaaagcacagaagagaaggaaaggaaagagaaaacgaaacaaaagaaaaaccagc

SEQ ID NO: 7220 - DNA, 594 bp, Homo sapiens; identical to SEQ ID NO: 3219
  misc_feature (565)..(565): n is a, c, g, or t

SEQ ID NO: 7221 - DNA, 3998 bp, Homo sapiens
  misc_feature (3035)..(3049): n is a, c, g, or t
gggtgtcatggctgcttgaagtcccgggagtcggtgaggcggctgcaggtccctccctgcggagccgctggtccggctggcggagatgtgaccgcgggcccggccggcctgcctcaggcgtcgcgtcagctcccgtgtccgtgcccttaacccacaccgatggcgggatccggctgcgcctggggcgcggagccgccgcgttttctggaggccttcgggcggctgtggcaggtacagagccgtctgggtagcggctcctccgcctcggtgtatcgggttcgctgctgcggcaaccctggctcgccccccggcgccctcaagcagttcttgccgccaggaaccaccggggctgcggcctctgccgccgagtatggtttaagcatgtttcttaccagaccgaaggtctgtgttgaccttaaccggagagtgactttgtatggagtgtttacaatccaggttgttctccaaagtgtgccatcacgctgtctgttgcttgaactcctggatgtcagtgtttcggaattgctcttatattccagtcaccagggttgttccatgtggatgatacagcattgtgcccgagatgttttggaggcccttgcttttcttcatcatgagggctatgtccatgcggacctcaaaccacgtaacatattgtggagtgcagagaatgaatgttttaaactcattgactttggacttagcttcaaagaaggcaatcaggatgtaaagtatattcagacagacgggtatcgggctccagaagcagaattgcaaaattgcttggcccaggctggcctgcagagtgatacagaatgtacctcagctgttgatctgtggagcctaggaatcattttactggaaatgttctcaggaatgaaactgaaacatacagtcagatctcaggaatggaaggcaaacagttctgctattattgatcacatatttgccagtaaagcagtggtgaatgccgcaattccagcctatcacctaagagaccttatcaaaagcatgcttcatgatgatccaagcagaagaattcctgctgaaatggcattgtgcagcccattctttagcattccttttgcccctcatattgaagatctggtcatgcttcccactccagtgctaagactgctgaatgtgctggatgatgattatcttgagaatgaagaggaatatgaagatgttgtagaagatgtaaaagaggagtgtcaaaaatatggaccagtggtatctctacttgttccaaaggaaaatcctggcagaggacaagtctttgttgagtatgcaaatgctggtgattccaaagctgcgcagaaattactgactggaaggatgtttgatgggaagtttgttgtggctacattctacccgctgagtgcctacaagaggggatatctgtatcaaaccttgctttaatcagtaacctaaggactgtttcctttttctcctcttccatttcttgggttattccacatatgaatgcaggactacccccttaccattttaagaaggtactttatacatttatttaatcctactaatgtgcagccattgcccaagcagtgactgcgttgcatacatttggcactgagtaggacaagacctctcagctatacattgaggggttttagagcatccatgtgggcaacccttttttgtgcgggagagcaggtgttgctcttcagtatgtagcctaaaaaaatcttaattatttcatggatcatgaagcaaggatgaataatatcatgtcttggtaaatactaacaaatttgttaggtttggtgacatcatttacagattatttctttatgttgtccagtggttcttccttattgttgatatccattagccggccctcgatgccctcagtaatgttaagtaattgtcaagcagcagttacctactgtgttcttaacactgagttgtgaattttttcttaaagcagtactgtagtactgaatattcctttaaaggaactgcagtgagcctatctaagtttttttaaattaaggcttttaaaatagaaagctgatgcttgatcttgcacaatttttatgtctagtatgtatgcttgagtgaatgtgcgagtatgaatgattagagaaaatttgagtcagtgtactttatagtgtgaatcctgtgagctaatacagtctatacttatttcttccctacctgtttcacatccgtaagatttaagatatacattttttgagaggtagtctgtctgatacaatgtaaatgacaaaacataattcctgagaggcccagaaacaactggagtctagcctggagttaaattgagacttctaaaatgattggaacaaagactaagttgtgccagatgtaaatcaacccctcttttagtttactttagactttgtattagctcatcttttttgtagtaaatctatagttttaaggtttctcaagatgtggctctacctactatgatgaaaattgaagtgggtcaaaagaattagatgtacagtgaagggaaaagaaaaaaaatgggcgaagagagggtggaaaataaaaggattcttttttcttcctttctgtttctcgtatccctgctccctttttcctccccttccctcattctttgcctctatccttagctgaagacaaactagaggagcagcatcccaggtagtttggcttttgactgcaaggtagttaagaaaggtgtagatataatgaggtagaagtagaaaggaagaaaaactcaaagaattcttaaaaggattcatagcaacataatgtgtccctgagtagaggatgctgctatgcgtgagttcatggacacaagttgattacatggtttttagaattataattatggattcttcttatttcatggtaggttgtctttaaagatataaaaattaggatgcctttatgaagcactgattataccaaaaaaaaaaacaagttatatacaggttattaatttttttatttatttattttttcctaaggaaaaagtcttctatctttccctgctggaagcctcctcatatttcctnnnnnnnnnnnnnnnggttgctgagagtccagttagaatttgcattttacagaatgaaatactttaccccattcaaacaattattgtttgacattttagttatttataattgtcaaattcaggactctcctttaatgtttattatgaaaccaaatttggcataaggaggctgatttatgaattaccaaagggtcttgtggcatgttccccaatacatgcccttagaaggaagaactattattttttattttggccctttcaggagttgattataaattggtttgttttcaagtcagaattcaagtgggcagaacccgtattgtgaagacctaaactttcctaaatgttcatatgggtagcagattttgtggtgattagaaacatcaggtccttaaatacgatgaacatgggatacaaaggaattctttataagggcaagtatcctaagttagcacatttacttttctctcccctccgcccccaaaagaaaaatccttacaaataaactgcaggtaggcttctaagcctagtcctgcagtatgctgctaacatcttgatgccaatcttcacagcattctttgattgtcatcttattgctgatacattcatacatatatttagtgcttgacactgtagaattttgttacagaagatggttactagattttaagggagctgagggaataattgatgagccttgaattaaccatgcatttaattagatttttttttgttgttgttgttgttttgagatgatgtcttgctctgttgcccaggctggagtgcagtggctcaatctcggctcactgcaacctctgcctcgcaggtttgagcgattctcctgtctcagcctccccagtagctgggtttacaggcgcttgccaccacacctggctagatgttttatattaaagccagagaattgaaaaagaaatgcctcctgtgattgaaattattttatagc

SEQ ID NO: 7222 - DNA, 6729 bp, Homo sapiens
agcccacccgcctggctgcgcgtcccgggcccggcggctgaagaggagccgcggcgaggaacaagagtgtggtgagaggacgcggaaacacctgatatcccagcaaaggaagctgcagaggaagggtcctgccccgtgagcgaggacagcctccaggagcacagcggcttctcctaacatccccctggcagtgaattacggatgaccccgtatatgaggaggtgtggatgccgacacacggggagagctcctgagaccagcacacaggaccagtgtcctccccgtgaccttgcagttgtgtagccacaagtgggagccacagagaaggagagcccataaggggactcttttcaagacacggtgttaaatcaaggctctgaagttggggccacagccggtctcagctttctgtgttctgggggcgcggtgatatgacagcatgtgaagtgagtgggtgagcacggactcctgagagcgagggcgcacccaatacctagttatccggtactgcagagagacacctggtcagccagcgttgcaaagagggatagctagtcactcaggctgcagagagagacacctggtcacccaggctgcagaaacaaccgcagtcaactgcagctccagtcattgctggatgttggctgacgcggtcctggcgccagctggagatccattcaccaagactttctgggcagatttaaagtggctggggttcagaagttcagcaagttggacacacccctcctcgctggagaggagagggcaaaggcgaggcgggggagcagcgtgtgagattccccccttcacacacacaacaaagcgtggacacacagaagtgaaatctgatcgcgtgccaggaaaagctgtgaggctggaaaccccggagtaaggctcgaccttggccagacctgcaggctgcggaaccgggggcgcgcgggcgcagcgcagcacagcccggccatggagcacgcggtggccccctgcgtcctctacccagggactgagcccggggctgccggggagagcgagagcgagggcgccgcgtccccggcgcagacaccctgcagtctcggcgcgtccctgtgcttcagctccggggaagagtccccgccgcagtccctcgcctcagcggcggaaggcgcggccacctccccgccctccagcggtggcccgcgggtggtggagcggcagtgggaggccggcagcgcgggcgccgcgtccccggaggagctcgcgtcccctgaggagcgcgcgtgcccggaagagcccgcggcgccgtcccccgaaccgcgcgtttggcttgaggaccccgcgtcccccgaggagcccggggagcccgcgcccgtacccccggggttcggggcggtgtacggggagccggacctggtgctggaggtgtcggggcgccggctgcgcgcgcacaaggcggtgctggcggcgcgcagcgactacttccgcgcgcgcgcgtcgcgggacgtgctgcgggtgcagggagtgagcctgacggcgctgcggctgctcctcgccgacgcctacagcgggcgcatggcgggcgtgcggcccgacaacgtggccgaggtggtggccggcgcgcgccgcctgcagctgcccggcgccgcgcagcgcgccaccgacgccgtggggccgcagctgagcctggccaactgctacgaggtcctgagcgcggccaagcggcagcggctgaacgagctgcgcgacgccgcctactgcttcatgagcgaccactatctggaggtgctgcgcgagcccgccgtgttcggccgcctgtcgggcgcagagcgggacctgctgctgcgccgccgcctgcgcgccggccgcgcccacctcttggccgcggcgctcgggccggcgggggagcgcgcgggcagccggcctcagagcccctcgggggacgcggacgcgcgcggggacgcggccgtctactgcttccacgcggcggccggagagtggcgcgagctgacgcggctgcccgagggcgcgccggcgcggggctgcggcctgtgcgtcctctacaactacctcttcgtggcgggcggcgtggcgcccgcgggccccgacggccgcgcgcgcccgtccgaccaggtcttctgctacaacccggccacggacagctggagcgccgtgaggcccctgcgccaggcgcgctcgcagctgcggctgctggccctggacggtcacctctacgccgtgggcggcgagtgcctgctcagcgtggagcgctacgacccgcgcgccgaccgctgggcccccgtggcgccgctgccccggggcgccttcgccgtggcgcatgaggccaccacctgccacggcgagatctacgtgtccgggggctccctcttctatcgcctgctcaagtatgacccgcggcgcgacgagtggcaggagtgcccgtgcagcagcagccgcgagcgctcggccgacatggtggctctcgacggcttcatctaccgcttcgatctgagcggcagccgcggcgaggcgcaggcggcggggccgagcggggtcagcgtgtcccgataccactgcctggccaagcagtggagcccgtgcgtcgcgcccctgcgcctccccggcggccccacgggcctgcagcccttccgctgcgccgccctggacggcgccatctactgcgtgagccgcgcgggcacctggcgcttccagcctgcccgggaaggcgaggccggcggcgacgcaggccagggcggcggcttcgaggcgctgggcgcccccttggacgtccggggtgtgctcatcccgttcgctctcagcctgcctgagaagccgccccgaggggagcagggcgccccgtaggccggcggggtcggcgggcgtctccctcggcaggggtttgcggggcccaggtccctttgggcccgcggaggaggacgtggtggggagtcggggccgctggccacgctggtggtttggacacttcgaaggagccccgaggacgctctcagggccgctttcgctttgctttccttttgcttgtctttgcttctgggggtggatgccttgagacccaggaggtgtgcggatgggtcccttgacagacaggacacagagaaggctgtgggatccaaagggtcagcctcagggtacagtgggggttcctgaggcagcctgcagccggccccggggtgtcccgaaccccgcagagcaccgaggctgtgcgcaggagcctgggaccctcaagtaggtcgccgcgaactatcgggggaagcacgcagagaggggtcacgccttttatttttggcttgagatttaaaattataactgataagtaaagctctttctgatttagttgaaaatttcgtaccatgtgctcgctttggttggctcaactccaaaaagagtaatttaataagcattaaaggtaaaatctttgattaccagtaaggtttcttgttcaatatgcattggaagtatttccttccccacaccattgctactcaaactcacatgcctagagcagctccgtctcactgttggaccgagggggctttcatattttcagttgaaaggatgttaactgatgtagcgatgatttaccattatttaaattttaagtcttcagtggctaaatgtgaccaaacagcacatcataagtaggaaaaacttaccagggtgcttgtctatctaaaaagcaatttttgatagtccactctgtatgcccagccgctttcataatctggaacgagataaaatattcctaaaaagcggggaaaatcattttgctttgacagttctataaaaaaaagtgtaggcacattttaaacccactgtatatgatgttttcaatgtggatcgtgtagttctgatgagggagattaatttttacaatcagtattctaagtgtggccgagtgacagtgggcatagatttataacaaggaagtgacgtgcttatcaccatagatttgcaagtaaactgcatgtatttaattgtattgaattgagttccaaaataccctaatagaattaacacgaggctcactgcattgacagggtatgaggattaaaaacaaatcagttgggtcgtttctcatttaacattttacttttcaagtgtgtatacagaggacttactattatgactttgaggatgagatccatgctcacaaatagaggcgaacatttgaactccgaatccaacccattttcttactgtaagaggaaaagttactggaacgtaactagttgaaatcctgcctactttaatattatttgtttgttaatccagtaatgggaactgccatctctgtagaaatcagtgggtaattgaaaaataggttatgctttttaaagagtctgtggttatgagaggtctcagttaagtgtgtttagaagtgatcagcttgaaccttatgcatgactcgggggctggaatttatgatctgggttacggtatgttctggggacgtgtctgcttgcccatggttactcatgaactgaggggatagcttggcaacttggttaatcatcttgggaaagaaaaacagacttcatatcgcctgacttgattggccttttataggagtatactggagaaatggttgtagaaacagtatttacagcaaaaggaaacaaataatgttcattttaagcaatgtaccattcacactgtcctgccttttcctctagaattttattaatggtagaaatttttatatgaaatgggaccaggaccaggctaatattttcagtccttaaatatcaaactcatatgctgttatcactgtgattttacttgtgaaatcattcctgtaatgtttagtgtttgaaaatgaaatattgaaattaggtttccagagtaacactgtccccggaaaaggatatgagaagtggtggatgttggatgggggtggttgcacagtcctgtgcggttcccatggctttccagcgtttcatttagtgaaggaatgctcacactagatgtagcacagcttcctgtggggcccggcagcaaagccccaggtgctccctgtcacctcacaacaaaatgcactaagaaacgtaaagaataagaggaattaatacccaccattaaaggatgtccggccaacctattgtggaaatttatagaatagtatacaccacagttctgaatagtgatatcacataaaaatacatactagaggacctgccaagccatgagcagtgtttttgctttttgggggccagtccctggggtgtggagccgctagggtttgcacccatgaaacagaaaagccacaccctccaaggtgtggctttcattttgggactgctgcagggagggcagaggcattgctgagactgcctggcaacggctgatgccccaggtaggaccttttccatttcaaagtggtgttctaagtctgcgtccaacactgtgtaggaaaaaggttggtgcaaaaatattcctggtcatccacccattaaaatagttagatgaggctattgccttgatgacagctgtccacactcctcatgaaattaacccgtatgccggggcatttccaaatgtctgactcgtgaaattaacccatacgcaggggcctttccaaatgtctgaaaaggcagtggtgtcttttggggaaaatgttatgcatggaagcctgaccttttgcttagttgacagcaatcccttctgtattgccaatcaaggttcatttgagatgcagaggaatgagcttgagccttcctccttttccttccggttttattcttcctcttgggaacatccctccactccgcactgcttcctgcagctttgtagagctggatttggaacttcgggatttggtttctgagtctgtggaggcaccgacttctcctgtaagaaaatgaatgttgtggaaattctttggctacttaactaaaactcgtgactgtataagtttggctacaaataagtaagaaattaatcatctgctctgtttctgctaatttctggtgtcacttcagtaattctggtagcagccgttgaatctgtcagtctcttaggtaacttcctgtaaacgatttggaaataggatgttttcaacgttcttttgtcttttgctgaagtcaggatagattcaagacataatctcttgtaagatctaaatagagcaaatgtaaacaaaagtgcatttttgtattcttgttaattttagatgctttcctagcttacaaaaagttctatttttgggttaaaaatcaatcaactttctgatatttccccttctgcaatgttattgttcataagaaaacacgagctgaaaatggaaatctgcagttgtttcagttgtcttgaatttctttcagtggccacatcatttccacgttttccacatccgggaggaagcctggactgtgcagccttcgggcacccggcacagacactgtgctggcaggagcttcagacacgccaagtggatggatttggattgaacgcatatgaaacaggagacgggttctcatgtgagatcaaagctcctccaaagcctgttcaagctctaagcgattctcaaatgttaccatttattaaaggtaaactacacctgttgaaggccaagttcagggcagctgttgtgatctgtgtagttaatgtatttattaatgcttgacttttaaaatcctgggcataaatagtgcagagcctcgtatgtttgtcagttcatgccgagatgaaataaatcacgcagaaagtgccagtcaaaaaaaaaaaaaaaaaaaagac

SEQ ID NO: 7223 - DNA, 1897 bp, Homo sapiens
  misc_feature (1302)..(1320): n is a, c, g, or t
gccgcgagccgccgccgccgccgccgccgcgcacctcccgtccatggccgtgggcctgggccgctccgggctccagcccaggcccatccgccgccctcccctccacccagagacaggcatgcccgcccttggaggagaaaacgcgggagaaactgaccaaggaggcatttttgcagtccaaggaaggaggggccaaaaaataaaaagcataataaacacccagactgttttgtatacatatataacaaacaaaaccggaagagaaaaagggggcgatcatgagatctcgttcatactgtggtggtgtttcgtttttgtttttgtttttaaagaagggtgaagatgcctgacgcacgaaaactgcactcgtgaggtttttccaccctgagatgacctacacggcagcggtggacagcacctgcctcgtcttctcctctttgaaaaaaagagagagagagagtcccctttcctttcactttctccctccaaaacagctgcctaaagagatccacggaaactttatttcctgggagcgacctgagagaaaacagaggcaccaggttccatcaggggacgacaccgtgctctgggaccctgtttttcttggccatattaaagtcatttggaaacaaatcaactctgaaatgggaaggaggggggaaaaacagtctccaagaaaaaaaataattatattgacagcttctgaaactaacagactgaatagcaaagccaaaagaaaagtatcctcaaagtaaccttggaaataaaaggatcgggaaggagcagagggagagggggaacgtccgctgaggagtggcgagaggccccggccgagtcgggtcgcgggcgggcgggcgaactgggagcagagcgggggcccagccagcgaggccgccgagccaggcccggccgcgtacccaggctttgacggctgccattcagggtggacgatgcctaaagattccaccgctaatattttttttattaatattttttattttttatttctggactgactcagataaaggaatttagaaagactgagcaccagccgctgcacttctctggacttctctcctcaatccgttgccaactttgattgaatgggtgctgtggatgtgattatataatactgccatttccaagcagtgtttttggtaggttttaataaacagacttttcaaaagacggccatatagaattgttagatccgttgttgatctaaaaatatttgctttatattttcattaaatgacttcttttaatattttattcagaatacttatgaactgctggcaaagnnnnnnnnnnnnnnnnnnnagatcttgtattacgtgtttttttcagacgagcacaaatcaaaatgaaatgaaaatatggacagttgttaggtaataagggtatcttttgatgtgatcatttgattgtaatttaatttgagtagtgattccgtaagagctgatcgagaaaataaatttgttagaatgaaatagtctgtgtctgatgcgtaaacactgtgtgggaagaaaagagttctttaagaaatatttttttactaatgaaaatccctaagtaatagcgttgaggaagtagagcctgctccacttaaggtacttttggaaatctagagtaaagcataggtctttgatgagacggcccagtacttttaacatagtagtcactcctcgataatccattaattcacaatatttttctctcccgttaattttagtggatgtctttagtgttttcaggtgagattgcctaaataataaccctctttttggcgatacctgtgtttcttatcgaaagattgaacgatatactaccagtacaaattgaaccaatctggctattaatggttaatacagcccctcccccacagttgcatgtgagg

SEQ ID NO: 7224 - DNA, 3151 bp, Homo sapiens
gacgtactcgccacggcacccaggctgcgcgcacgcggtcccggtgtgcagctggagagcgagcggccaccgggagcccccggcacagcccgcgcccgccccgcaggagcccgcgaagatgccccggcgcagcctgcacgcggcggccgtgctcctgctggtgatcttaaaggaacagccttccagcccggccccagtgaacggttccaagtggacttattttggtcctgatggggagaatagctggtccaagaagtacccgtcgtgtgggggcctgctgcagtcccccatagacctgcacagtgacatcctccagtatgacgccagcctcacgcccctcgagttccaaggctacaatctgtctgccaacaagcagtttctcctgaccaacaatggccattcagtgaagctgaacctgccctcggacatgcacatccagggcctccagtctcgctacagtgccacgcagctgcacctgcactgggggaacccgaatgacccgcacggctctgagcacaccgtcagcggacagcacttcgccgccgagctgcacattgtccattataactcagacctttatcctgacgccagcactgccagcaacaagtcagaaggcctcgctgtcctggctgttctcattgagatgggctccttcaatccgtcctatgacaagatcttcagtcaccttcaacatgtaaagtacaaaggccaggaagcattcgtcccggggattcaaccattgaaggagcttccggagaggaccgctgaatattaccgctaccgggggtccctgaccacacccccttgcaaccccactgtgctctggacagttttccgaaaccccgtgcaaatttcccaggagcagctgctggctttggagacagccctgtactgcacacacatggacgacccttcccccagagaaatgatcaacaacttccggcaggtccagaagttcgatgagaggctggtatacacctccttctcccaagtgcaagtctgtactgcggcaggactgagtctgggcatcatcctctcactggccctggctggcattcttggcatctgtattgtggtggtggtgtccatttggcttttcagaaggaagagtatcaaaaaaggtgataacaagggagtcatttacaagccagccaccaagatggagactgaggcccacgcttgaggtccccggagctcccgggcacatccaggaaggaccttgctttggaccctacacacttcggctctctggacacttgcgacacctcaaggtgttctctgtagctcaatctgcaaacatgccaggcctcagggatcctctgctgggtgcctccttgccttgggaccatggccaccccagagccatccgatcgatggatgggatgcactctcagaccaagcagcaggaattcaaagctgcttgctgtaactgtgtgagattgtgaagtggtctgaattctggaatcacaaaccaagccatgctggtgggccattaatggttggaaaacactttcatccggggctttgccagagcgtgctttcaagtgtcctggaaagtctgctgcttctccaagctttcagacaagaatgtgcactctctgcttaggttttgcttgggaaactcaacttctttcctctggagacggggcatctccctctgatttccttctgctatgacaaaacctttaatctgcaccttacaactcggggacaaatggggacaggaaggatcaagttgtagagagaaaaaagaaaacaagagatatacattgtgatatattagggacactttcacagtcctgtcctctggatcacagacactgcacagaccttagggaatggcaggttcaagttccacttcttggtggggatgagaagggagagagagctagagggacaaagagaatgagaagacatggatgatctgggagagtctcactttggaatcagaattggaatcacattctgtttatcaagccataatgtaaggacagaataatacaatattaagtccaaatccaacctcctgtcagtggagcagttatgttttatactctacagattttacaaataatgaggctgttccttgaaaatgtgttgttgctgtgtcctggaggagacatgagttccgagatgacccaatctgcctttgaatctggaggaaataggcagaaacaaaatgactgtagaacttattctctgtaggccaaatttcatttcagccacttctgcaggatccctactgccaacctggaatggagacttttatctacttctctctcttctgagaatgtcaaatcgtggtttagatcaaatatatttcaagctataaaagcaggaggttatctgtgcagggggctggcatcatgtatttaggggcaagtaataatggaatgctactaagatactccatattcttccccgaatcacacagacagtttctgacaggcgcaactcctccattttcctcccgcaggtgagaaccctgtggagatgagtcagtgccatgactgagaaggaaccgacccctagttgagagcaccttgcagttccccgagaactttctgattcacagtctcattttgacagcatgaaatgtcctcttgaagcatagctttttaaatatctttttccttctactcctccctctgactctaagaattctctcttctggaatcgcttgaacccaggaggcggaggttgcagtaagccaaggtcatgccactgcactctagcctgggtgacagagcgagactccatctcaaaaaaaaaaaaaaaaaaaaaaattattctgtaccattcacaaacttttcacaaacgatgggcaagcccttaatgttttggggaggccttggtttggctagggccaaagttaacaagtggaacctagtgggaggccaaatgtgtgtgtgtcccgggcgtcggggcggcgggtgttccatggtcattaaccattttattcctggtaaaatggtggtagaataaccaaaaaaaaaaaaaaagaaaaaaaaacacaaaaaaaaaaaaaaagggggcgaaatcccaaacagaagacacatagtacacgcaaaagataaacaacggccaatacagaaaacaagcgaagacaagaggaacacaaaagcataaggaactgataaacagaacagcg

SEQ ID NO: 7225 - DNA, 1046 bp, Homo sapiens
  misc_feature (328)..(356): n is a, c, g, or t
tttttttttggatattatttcatctatctctcaggacaatcttgtaagaccatattttcctcattttagagatgaagacaaaaatgaaaacaagttgaatactttgccctaggttaatgagctagtaaacagccatttcaacaggcaggatttcaacttaggtttgctagactctaaaaaatcactctctaacctttggtttaaaactcagaccttaaaattactatgcatataaaataacatatataacatatataaatgaatgactcaaaagcacctcccacccaacataacaaaactgaacatataatttcctgttttggttctnnnnnnnnnnnnnnnnnnnnnnnnnnnnncttaaatatccctctttctcacacctcatatttaatcaataataaacttctatccattttgcctccgaattttttttcaagtccgttcacatctctttacttccatcactaccaatctaggctaagccatctgtggaattacttgattaatgttcctctcccctactaatctgtaagttcaatgagggcaggacctaagtcttttttgttcaccgttatagtcagtttttgtctaatgcccagaacagaagaagtgttctataaatggcagctattattattttggtctatttgctactgttctgtgtataagtttgtctttctaaccagactgcaaacatcttgaggggctgtttcttgtactgcttctgtattatcctaaggataagtcagtgaatgttaagcacagattatgtacttcataatcagagtataagcacagaattttttagcccagtagagatttagaaattagctaggccatccccccattcaacaatgaagaatctgaagaagttacactcccaggtcatactgttagtggcaagtttagagtggaagactggtgttctcctgcctgaacattaagttccttccttctactacagtcagatctagtcttacagtctctgctgagaagggcttaagccttatcctgccaatcagtttgctcaaagagcgttgactatg

SEQ ID NO: 7226 - DNA, 604 bp, Homo sapiens
ctttttttttttttttttctggaaccaccagagcaaaacccagcctggggaatctctttagttcctcttgctaccacatccatgaatatgtctgctatgcttatgcatttcttcaggtcttgcatgttcttcattaaatgagttgactgtgctgcaacctcaaatttttgaaaatgctcatgtcactttggtgtttgggatgattatttctcctacttgtttgagtctctgcagataaccagactctgcctgtctcctcctcctttcccttctatgacaccacagatgacaaaggtgctaagcaaatagatgttaagtaaaacaccaatgtgggttcagtttaataccgtgctctatcaacccgctctattgcctagcaaccatggtggctcaccccgagttcattttcatttaaatgtgccacacagaaaagcagcctaaatatatatcgtcagttctgaagcatataatctgtaaactacaggaacaggcagatcatttccattagttttttatgtagcaaaaaccacaattttcacccaaagagtgtaattatattcaaattctgaacgactgcctcggaaatagttgaaattcatagttg

SEQ ID NO: 7227 - DNA, 1046 bp, Homo sapiens
  misc_feature (9)..(9): n is a, c, g, or t
  misc_feature (126)..(149): n is a, c, g, or t
caggctgtnccgtccggaatccccggattttcaaagctggtgcgttagtggctcctgttgtcaggtcttaatttcacacctttaacacccgcagtggccatgtgctgagtgacagttgcagttgtnnnnnnnnnnnnnnnnnnnnnnnngtggggtgttgagttcacttggcttcagcgctagggaggagcagggccgtgcgactcacaggacgctatgggaactgctgaattcatgtgaaatgccgtttgcaaacccagtaagaacatttcactgattcagagccttcttacactttcagttgggatggcctggggggaagtcagtttttttgatttaattcaataccttttctccatctatttagtatgagatcatcacaacaaacagctttcagcacaataaaaagttctttttcattctggtgtcgatggaagttgatctctctccttctccgattagaaaatctgagatagcagccggccctgcgagaatctccatgattagtccacctcaagatggacgaatgggcagcgtctcctcccggggccccgagcatcccggcctgacaacgagtcagaggagcgtgggaaagcctctcaggattccacctctgcaaattccctacaagggacccccactaacgccaacaccacagttaccagggagagcaggaagaggggactctccaagcttcgggggctcccaggccaggctgcccccccggccgcccatcagcatctccagcctgctgcagaggcagtgtttagtgtgaagttttgaagtcatttcaaagacaaagttgtgtttttaccgcgacttccatgcctcctgcgggacctgctcaccttggggcagtgacacctgaaagatgagcacccagccacccgctctgcccccttccagtcctccagccttcgtgcccaccagcatgtgtacgttagacagccagtgcgactgtactttccctcttgttgaaataattaagtaatgtagtggaataaagtatttttctgattatcaaaaaaaaaaaaaaaaaaaaaaaa

SEQ ID NO: 7228 - DNA, 5052 bp, Homo sapiens
  misc_feature (1830)..(1850): n is a, c, g, or t
  misc_feature (3195)..(3217): n is a, c, g, or t
  misc_feature (3789)..(3804): n is a, c, g, or t
  misc_feature (4935)..(4935): n is a, c, g, or t
  misc_feature (4950)..(4950): n is a, c, g, or t
  misc_feature (4991)..(4991): n is a, c, g, or t
  misc_feature (5006)..(5006): n is a, c, g, or t
  misc_feature (5025)..(5025): n is a, c, g, or t
  misc_feature (5035)..(5035): n is a, c, g, or t
  misc_feature (5050)..(5050): n is a, c, g, or t
ctaaacgagcttgtcgatgtcttatactggatgattgtgagaaaagggaaattaaaaaggtgaatgtcagtgaggaagggccacttaattctgcagtagttgaagaaatcacaggctatttggctgtcaatggtgttgatgacagtgattcagctgttataaactgtgatgactgtcagcctgatgggaacactaaacaaaatagcattggttcctatgtgttacaggaaaaatcagtagctgaaaatggggatacggatacccaaacttcaatgttccttgatagtaggaaggaggacagttatatagaccataaggtgccttgcacagattcacaagtgcaggtcaagttggaggaccacaaaatagtaactgcctgcttgcctgtggaacatgttaatcagctgactactgagccagctacagggcccttttctgaaactcagtcatctttaagggattctgaggaggaagtagatgtggtgggagatagcagtgcctcaaaagagcagtgtaaagaaaacaccaataacgaactggacacaagtcttgagagtatgccagcctccggagaacctgaaccatctcctgttctagactgtgtttcagctcaaatgatgtctttatcagaacctcaagaacatcgttatactctgagaacctcaccacgaagggcagcccctaccagaggtagtcccactaaaaacagttctccttacagagaaaatggacaatttgaggagaataatcttagtcctaatgaaacaaatgcaactgttagtgataatgtaagtcaatctcctacaaatcctggtgaaatttctcaaaatgaaaaagggatatgttgtgactctcaaaataatggaagtgaaggagtaagtaaaccaccctcagaggcaagactcaatattggacatttgccatctgccaaagagagtgccagtcagcacattacagaagaggaagatgatgatcctgatgtttattactttgaatcagatcatgtggcactgaaacacaacaaagattatcagagactattacagacgattgctgtactcgaggctcagcgttctcaagcagtccaagaccttgaaagtttaggcaggcaccagagagaagcactgaaaaatcccattggatttgtggaaaaactccagaagaaggctgatattgggcttccatatccacagagagttgttcaattgcctgagatcgtatgggaccaatatacccatagccttgggaattttgaaagagaatttaaaaatcgtaaaagacatactagaagagttaagctagtttttgataaagtaggtttacctgctagaccaaaaagtcctttagatcctaagaaggatggagagtccctttcatattctatgttgcctttgagtgatggtccagaaggctcaagcagtcgtcctcagatgataagaggacgcttgtgtgatgataccaaacctgaaacatttaaccagttgtggactgttgaagaacaggtaataaatatttcaaaatcgtgtaggcttaaaaaaacaagtaaacagttaacatcagagtcagtattatgaggccaggtccagtggctcacgcctgtaatcccagcactttgggaggctgatatgggtggatcacttgaagtcaggagttcaagaccaacctggccaacatggtgaaaccctactaaaaatacaaaaattagccgggtgtgatggcgtgtgcatatataatcccagctactcgggaggctgaggcaggagaattgcttgaacccaggaggcagaggttgcattgagccaggatcatgccactgcactccaggctggnnnnnnnnnnnnnnnnnnnnntcgctaagaaaagagcctgtattttgagtcaggtgtatattgttgtatgtgatgcctgttagccatgagttttaaatatttaggcttatttttgtatacctttttgcatacgtcaagaattttggattttgagaatgtgtaaacttttgtttggggataattttaaaagaaggaacctgggttttgagaggggagtagaagtggatagaataaaatagatgtttttgtaatgtagctttgggagagagaaaaacctgaggccagtaaagctgagcttcaaagtgcattcttatttttgttgtcgaagggaggtgaggaagtcaagtcagttttggcatacagtttagaattgttttttggctaatggctagggttgttagtgggtgaagtttgaggcacatctttgtctcatatggctattaaccccacagctatacgtttaacagtttataaaaagctttgggaaatctatttatttcaagcatccagatttttctgcatctttaggactatgagaagatacaggagacaagaaggaatattaaaatcaaatatttgaataaaggaccatacaaaagaaggaaaagcctcttttaatagtcgaaatttaagtgaatttacacgtttttgttaaaactgtaggggaaagaaaagtaagaaaagattgaccatcttttcttggatttcagtggatttagtgatttcagtggaaatcactaaaatgtgtaatctaccaatttgtttacttattttctgttttcttatgagatatttttacttatgtgaatagaaaacttttctaagctctttcataagtttattctctaatttcattgttccctgtgaagtcttaagtttctaactagaaatttttcctaccatgaggatttctaattacgtaacccccaaaggtgggagagagtattacattttgaaatgaaatgtgaatgtatttatttagaaattcaatatttaaaattaaatacatattttcttaaatttggtgtttgttgtggattagaaaaagctggaacagctactcatcaaataccctcctgaagaagtagaatctcgacgctggcagaagatagcagatgaattgggcaacaggacagcaaaacaggttgccagccgagtacagaagtatttcataaagctaactaaagctggcattccagtaccaggcagaacaccaaacttatatatatactccaaaaagtcttcaacaagcagacgacagcaccctcttaataagcatctctttaagccttccactttcatgacttcacatgaaccgccagtgtatatggatgaagatgatgaccgatcttgttttcatagccannnnnnnnnnnnnnnnnnnnnnncatcagatgacgaaagtattcctatcatgtataggaatttacctgaatataaagaactattacagtttaaaaagttaaagaagcagaaacttcagcaaatgcaagctgaaagtggatttgtgcaacatgtgggctttaagtgtgataactgtggcatagaacccatccagggtgttcggtggcattgccaggattgtcctccagaaatgtctttggatttctgtgattcttgttcagactgtctacatgaaacagatattcacaaggaagatcaccaattagaacctatttataggtcagagacattcttagacagagactactgtgtgtctcagggcaccagttacaattaccttgacccaaactactttccagcaaacagatgacatggaagagaacatcatttactagtcctcttcaacacatagcaatggtatcattgttaattatgtgcacagtttggaaagattctctgctttcccagaaatgacactcacagcatgagagcttcctgagtgttctcgtcaagtacagctctgcaccgttgtggctctagatcactgttcagcagnnnnnnnnnnnnnnnnagcaaaggtttccctggtgaatttttcaccactgcgttttaggtggtgatcttaaatgggtgagatggaacgagagcacacattaaagagagagtaaattccaaaggtttcaaagaacttggtcataaatatgataatgagaagacaaagtatttatattaaaacagtttagtagccttcagttttgtgaaaatagttttcagcacagaaactgacttctttagacaaagttttaaccaatgatggtgtttgcttctaggatatacactttaaaagaactcactgtcccagtggtggtcattgatggcctttagtaaattggagctgcttaatcatattgatatctaatttcttttaaccacaatgaattgtccttaattaccaacagtgaagcactacaggaggcaactgtggcattgcttccttaaccagctcatggtgtgtgaatgttataaaattgtcactcagatatattttttaaatgtaatgttatataagatgatcatgtgatgtgtacaaactatggtgaaaagtgccagtggtagtaactgtgtaaagtttctaattcacaacattaattcctttaaaatacacagccttctgcctctgtatttggagttgtcagtacaactcatcaaagaaaactgcctaatataaaaatcatatatatggtaataatttccctcttttgtagtctgcacaagatccataaaagattgtatttttattactatttaaacaagtgattaaatttagtctgcacagtgagcaagggttcacatgcattcttttatactgctggattttgttgtgcatcatttaaaacattttgtatgtttcttcttatctgtgtatacagtatgttcttgaatgatgttcatttgtcaggagaactgtgagaaataaactatgtggatactgtctgtttatattataaaaaagaaaaaaaaaaaaaaaaaatggttagattttggatttttttttttaccaagtgttaaaaccagaaattggtattttttaaaatggtttgcttcacatatttaagagttttctttctgtcatttatgaagaataaggaatgtattatgggaaaagaggggggatcttaagcaacccctgtaaaaaaatggnaaaagatttttaccncaagtgtgtgctgaaacactaaattaaacctagcttacaanaagggaaacacgggncaatgggttaaaggaaaangggcaattantaatggcccaaggtntt

SEQ ID NO: 7229 - DNA, 712 bp, Homo sapiens
tttttttttcttttttgcttggataactcttaggcaatccgtttccaggtcttcacattccataggtactccttcctaatctgtgtgtttaatccatgggttttcaaaacacatggattaaaattttacttatttgaggatcagagtgtattatggataaggtagttaaaacttattttatcaagccataccatgaaatactccaattgcagtcaatcctcacaatatttcatcttataaaatactgtttctatctgctgttaacaagaaataaggaacaaatttatgatgaaaaattatagatgtctatttaaagatgtgcagggagttacataatttaaaaaacaattatttgggtctaggaacagaagagtttgaagaccactgatgtagtatatgggagatttgaaacattttttttcttttttttctttttgagacggaatgtcgcttcactgcccaggctggagtgcagtgatgtgatctcggctcaatgcaacctctgcctccagggttcaagcaattctcctgtctcagtctccctagtagctcagattgttacaggcgtgtgcaccacgctggccaattccctgtatttttaaagagacagtgtttcacatgttggacaggcagtctcgaactcctgacctcaggtgatcaacgccctcggcctcaaagtgcttgggtcacaggctgaggcaccgcacctggc

SEQ ID NO: 7230 - DNA, 1474 bp, Homo sapiens
aatgaacacggagacggagcagggctactaggacgcacgcgcgagatagaacctctaggcacgagggagagattgaagatggcggcttctcaggcggtggaggaaatgcggagccgcgtggttctgggggagtttggggttcgcaatgtccatactactgactttcccggtaactattccggttatgatgatgcctgggaccaggaccgcttcgagaagaatttccgtgtggatgtagtacacatggatgaaaactcactggagtttgacatggtgggaattgacgcagccattgccaatgcttttcgacgaattctgctagctgaggtgccaactatggctgtggagaaggtcctggtgtacaataatacatccattgttcaggatgagattcttgctcaccgtctggggctcattcccattcatgctgatccccgtctttttgagtatcggaaccaaggagatgaagaaggcacagagatagatactctacagtttcgtctccaggtcagatgcactcggaacccccatgctgctaaagattcctctgaccccaacgaactgtacgtgaaccacaaagtgtataccaggcatatgacatggatccccctggggaaccaggctgatctctttccagagggcactatccgaccagtgcatgatgatatcctcatcgctcagctgcggcctggccaagaaattgacctgctcatgcactgtgtcaagggcattggcaaagatcatgccaagttttcaccagtggcaacagccagttacaggctcctgccagacatcaccctgcttgagcccgtggaaggggaggcagctgaggagttgagcaggtgcttctcacctggtgttattgaggtgcaggaagtccaaggtaaaaaggtggccagagttgccaacccccggctggataccttcagcagagaaatcttccggaatgagaagctaaagaaggttgtgaggcttgcccgggttcgagatcattatatcttctctgttgagtcaacgggggtgttgccaccagatgtgctggtgagtgaagccatcaaagtactgatggggaagtgccggcgcttcttggatgaactagatgcggttcagatggactgagcttggatgcttctgaggcaagctgaagctttgggttctgactgacccaccctacaggactgctgaacagagagcccagtgtgactagggatcctgagttttctgggacaattccagctttaatcaatacattttgttaaatgtgccataaaatgagactttttacgcctttataaggccttagatgtaaataaactcacccaaacaaaaaaaaaaaaaaaaaaaaaaaaaaaaaaaaaaacacgccaaaacgcgagataccagcaccgcggacagaaacagaagatcacgcgagggaccccctccaagacaccccgagcgtgaaggcaaggggcgctcagatggggctagacag

SEQ ID NO: 7231 - DNA, 968 bp, Homo sapiens
  misc_feature (862)..(862): n is a, c, g, or t
  misc_feature (869)..(884): n is a, c, g, or t
ttttttttttttttttttttttttttcttatcaaaaatattttatttacaaaaaattaattatactatacatcctatactggaaatacattgaataattgctaaaataaatacaggcaattaattcaactttttataagaatgagagaatttgacatttgaatgttatcaaagcttaacttagaacataaatagttaaaaaggcaaactcaagttttcatctcatttattggcatggtgtgttttgttttccacaagctctccaatcagtgagagtcttgagtctcagatgtacctttttgtactctgaaggtaggatgtgcagctttttcttaggcaggatagatgtaacatagatgactgcataaaaaagaggcagaaaggcaggaagcccattttttttttaacacttctccatgtgtctctgcctcaccataatgctgtttattcaattattcatatattccgattgtgttttcaacacaggtctacacagcaccagctacaaggcaaggtcaatcgtgtaaaaaataaaactggataatggaggccttgcagtaactaaattagccaagttcagagtatgtggttcaacaatttttatatgtgccaatcattgatatacttattaaaccttgatgtcacttctactgtgtagacatttttatacagggccagaacaggaaattagaagttatgatctgtgtaattcagaaaaaccaaaatcctcatttgaaagtaaaagagggtagatccctggtgatttctatctgccaatttgaatttaattgtttaataatttatccaactaaaccgggtaaacattatacttacatggtaagggaacgtgcaagtttgaaaanaaaaaannnnnnnnnnnnnnnnttaaagtgtgagtgggacccataaattcaggcccagaaccaaacctttgttaaacgggtttgttgggcccaaatttacagaaat

SEQ ID NO: 7232 - DNA, 1745 bp, Homo sapiens
ttatcagaggtgagcccgtgctcttcagcggataagatcccctacctggccgccggccactttctgtgggccgtggggtcctcaaggagacggcccttgggctcaggggctgcgtttccacacgcgcctttcccagggctcccgcgcccgttcctgcctggccgccggccgctccaacagcagcacaaggcgggactcagaaccggcgttcagggccgccagcggccgcgaggccctgagatgaggctccaaagaccccgacaggccccggcgggtgggaggcgcgcgccccggggcgggcggggctccccctaccggccagacccggggagaggcgcgcggaggctgcgaaggttccagaagggcggggagggggcgccgcgcgctgaccctccctgggcaccgctggggacgatggcgctgctcgccttgctgctggtcgtggccctaccgcgggtgtggacagacgccaacctgactgcgagacaacgagatccagaggactcccagcgaacggacgagggtgacaatagagtgtggtgtcatgtttgtgagagagaaaacacttttcaattgccagaacccaaggaggtgcaaatggacagagccatactgcgttatagcggccgtgaaaatatttccacgttttttcatggttgcgaagcagtgctccgctggttgtgcagcgatggagagacccaagccagaggagaagcggtttctcctggaagagcccatgcccttcttttacctcaagtgttgtaaaattcgctactgcaatttagaggggccacctatcaactcatcagtgttcaaagaatatgctgggagcatgggtgagagctgtggtgggctgtggctggccatcctcctgctgctggcctccattgcagccggcctcagcctgtcttgagccacgggactgccacagactgagccttccggagcatggactcgctccagaccgttgtcacctgttgcattaaacttgttttctgttgattacctcttggtttgacttcccagggtcttgggatgggagagtggggatcaggtgcagttggctcttaaccctcaagggttctttaactcacattcagaggaagtccagatctcctgagtagtgattttggtgacaagtttttctctttgaaatcaaaccttgtaactcatttattgctgatggccactcttttccttgactcccctctgcctctgagggcttcagtattgatggggagggaggcctaagtaccactcatggagagtatgtgctgagatgcttccgacctttcaggtgacgcaggaacactgggggagtctgaatgattggggtgaagacatccctggagtgaaggactcctcagcatggggggcagtggggcacacgttagggctgcccccattccagtggtggaggcgctgtggatggctgcttttcctcaacctttcctaccagattccaggaggcagaagataactaattgtgttgaagaaacttagacttcacccaccagctggcacaggtgcacagattcataaattcccacacgtgtgtgttcaacatctgaaacttaggccaagtagagagcatcagggtaaatggcgttcatttctctgttaagatgcagccatccatggggagctgagaaatcagactcaaagttccaccaaaaacaaatacaaggggacttcaaaagttcacgaaaaaaaaaaaaaaaaaaaaaaaaaaaaaaaaaaaaaaa

SEQ ID NO: 7233 - DNA, 589 bp, Homo sapiens
ttttttttttttttttttaaatacagctattttgaattctctgtctgaaacatcacatatctctttttctccaggatttgtccccagtgccttatttagttcacttggtgaggtcatgttttcctggatggtgttgatgctagtagatgttcttcagtgtctggacattaaaatcttgggcatgcagcaccatatgagaagtttaaaaaataaaatttaaagagagaaaaggtgagtatttattgtagtcttcactgtctgggattatttgtagctatctttcttgggaaggcttttcacatatttgaaaagagttgggtgttgtgatctaagccatatctgctttatggagcaccttatacccaataatgctgtaattcttccagactcagagaagtaccaccttgacagccttcaacaagatccaggagaattttctggattactagccacagactctttcccctaccttattttctctcaaagatacagagtctttctttctgttctaagcccctaaagctgggagaagaaagacacaagcacctctggccaccaccactatgactgccctggatcagacctgaag

SEQ ID NO: 7234 - DNA, 2371 bp, Homo sapiens; identical to SEQ ID NO: 5031
  misc_feature (2370)..(2370): n is a, c, g, or t

SEQ ID NO: 7235 - DNA, 1165 bp, Homo sapiens
gacagaggctagtgtcttattgtgttgtgtctgcctggaccagacagcggaacaacagctgggtgaatagcaaggatgtcttctccaagcctgttaacatattttgggcattagaagattccgtgcttgtggtgaaggcgaggcagccaaagcctttctttgctgccggaaatacatttgagatgacttgcaaagtatcttccaagaatattaagtcgccacgctactctgttctcatcatggctgagaagcctgtcggcgacctctccagggtaacaacacagcgaaagaaaatacatcatcactctctggaccaggattctgtggtgaagctggagaattggacagatgcatcacgggtggatggcgttgttttagaaaaagtgcaggaggatgagttccgctatcgaatgtaccagactcaggtctcagacgcagggctgtaccgctgcatggtgacagcctggtctcctgtcaggggcagcctttggcgagaagcagcaaccagtctctccaatcctattgagatagacttccaaacctcaggtcctatatttaatgcttctgtgcattcagacacaccatcagtaattcggggagatctgatcaaattgttctgtatcatcactgtcgagggagcagcactggatccagatgacatggcctttgatgtgtcctggtttgcggtgcactcttttggcctggacaaggctcctgtgctcctgtcttccctggatcggaagggcatcgtgaccacctcccggagggactggaagagcgacctcaggcctggagcgcgtgagtgtgctggaacttcttgctgcaggtgcatgggtccgaggaccaggacttgtggcaactactactgttccgtgactccatgggtgaagtcagcaacaggttctggcagaaggaggcagagatcactccaagccgttttattactgtgagatggatgtgctgacgcctcagtatccttgctgatcgggtcggtctggccacggcatcggccgaccggcatggggacgcggccccgcgtgttaaagaggtcgaaaacgggacgcccggccacttgaagaaacgcccggagaggcagagcagagggggaggaggttaacgggtaactccaaaaaaaggcggcggccgcccggtagtctggaagaag

SEQ ID NO: 7236 - DNA, 2406 bp, Homo sapiens
ccaaagtggctgtacggctcggattacgggatggagagggctctactctgagctctattttccaaggctccgggccgcgctcggcgctggcctgctgccccggcgggtccgccggccggaggcgggagtcacaggaagagccctccacaaaaggaggcctcggcggatcaggacagctgcaggtgggtgtgcagactggtgagctgccagcaggggcccagacgcgccaggcctggagatggctggaaactgctcctgggaggcccatcccggcaacaggaacaagatgtgccctggcctgagcgaggccccggaactctacagccggggcttcctgaccatcgagcagatcgcgatgctgccgcctccggccgtcatgaactacatcttcctgctcctctgcctgtgtggcctggtgggcaacgggctggtcctctggtttttcggcttctccatcaagaggaaccccttctccatctacttcctgcacctggccagcgccgatgtgggctacctcttcagcaaggcggtgttctccatcctgaacacggggggcttcctgggcacgtttgccgactacatccgcagcgtgtgccgggtcctggggctctgcatgttccttaccggcgtgagcctcctgccggccgtcagcgccgagcgctgcgcctcggtcatcttccccgcctggtactggcgccggcggcccaagcgcctgtcggccgtggtgtgcgccctgctgtgggtcctgtccctcctggtcacctgcctgcacaactacttctgcgtgttcctgggccgcggggcccccggcgcggcctgcaggcacatggacatcttcctgggcatcctcctgttcctgctctgctgcccgctcatggtgctgccctgcctggccctcatcctgcacgtggagtgccgggcccgacggcgccagcgctctgccaagctcaaccacgtcatcctggccatggtctccgtcttcctggtgtcctccatctacttagggatcgactggttcctcttctgggtcttccagatcccggcccccttccccgagtacgtcactgacctgtgcatctgcatcaacagcagcgccaagcccatcgtctacttcctggccgggagggacaagtcgcagcggctgtgggagccgctcagggtggtcttccagcgggccctgcgggacggcgctgagctgggggaggccgggggcagcacgcccaacacagtcaccatggagatgcagtgtcccccggggaacgcctcctgagactccagcgcctggaggaggcaggggcaggaagcggcctccaagacccttcgccttgggacaggaatgggcacctgcttctgagtccatacaggagaagaaagatctgtttcctctcctcgggcctccttctccctgggctggggactccaggggtggctgggagactgggcagccaccagcaaacagaccctgtggcccctgcccggctcccccacccattctgctcccctagagacctcttgtacagaagttgcccccaggtggtggggcccctccttgccctaggctggttggtaaaagagaggaggtcaacacccagcctagccacctctgcctcttgggtcagccctccttgactgtgtcccagccagcaccaggccagcagcctcatccctgccattcagggctgttccagagattcgatcctcttaaggcattatcagtgagcaaatgtgaaggaaatggtgtctggaagaaagttctggttcacatgccttgtagctaagtctttctgcaaacaacctcccttccccccgtcgagtcatttggtgactttgatggggggatttctggttatgtcaaggctctggagacaggaagggcctttggccgccttgggtagttgacctgccttttctgactccgggacgagccagtcctaggctgcctccgggagcacttgaggtatcccgcaggccatgaggacccactgggcagctcctggacagcctcttggctccagcccccacccgaaagtggacactggctccgccctggccacctggggactggcactgtggtgcacagtggcccaatgtggccaacggaagttttataaaagacaaaatgtatatcaataaacattttataacttgcaaaaaaaaaaaaaaaaatgccaaaaaccaacaccgcccccgccatccctcctcaccgaccatcactcactccttcccctttgtccacccttcatgggcgcccccccccccaagagaaacccctccaggggcgccaaagtttaacgcggacccccctttctttggtaaaagaggcgccctttataagggggccgtcatctaaacctatggccccgtgccccccatttttttacccaccccgggatacgggaaaaattc

SEQ ID NO: 7237 - DNA, 3029 bp, Homo sapiens
  misc_feature (705)..(722): n is a, c, g, or t
  misc_feature (1012)..(1026): n is a, c, g, or t
ggcaaacacaagctgctaagcactggccccacagagccatggtccatccgagagaagctatgtttagcatcttctgtcatgagaagtggcgatcaaaattgggtatcagttagcagagcaatcaagccctttgcagaacctggccgccctccagactggttctctcaaaaacattgtgcttcccagtactcggagcttttagagaccactgagacaccaaaacggaaacgaggtgaaaagggagaagtggtggaaactgttgaagatgttattgttcggaaattgactgctgagcgagttgaagaactaaagaaagtgataaaggaaacccaggagagatatagacggctaaagagagatgcagaactaattcaagctggacacatggacagcagactggatgagctttgcaatgacattgaaaaagaaattggaagaagaggaggctgaagtaaagaggaaggctacagatgctgcataccaggctcgtcaagcagtaaaaacacccccccggaggttacccactgtgatggttcgctctcctatagattctgcctccccaggaggtgattatccacttggggacttgactccaaccactatggaagaggctacctctggggtaacccccgggactttgccgagtaccccagtcacctcgtttcctgggattcctgacacccttcctccaggctctgcaccctnnnnnnnnnnnnnnnnnnccccagtaacagatgattcaccccagaaaaagatgcttggacagaaagcaactccacccccctcccctctgctgtcagagctcttgaagaagggcagcctcctgcctactagccccagactggtcaatgagagtgaaatggctgtggcttctggccacctgaacagtacaggtgtcctcctggaggtaggcggggtccttcccatgatacatggtggggagatacagcaaacacccaatactgttgcagcctcccctgctgcatcagagtctgtgtcccaagctaccatnnnnnnnnnnnnnnngctgccagcaccatcctctgctccggctgtctccactactgaaagtgtagctccagtgagtcaacccgacaactgtgttcccatggaggctgtgggggatccacatactgtgactgtttccatggacagcagtgaaatatccatgatcatcaattctatcaaagaagagtgttttcgatcaggggtagcagaggctcctgttggatcaaaggctcccagcatagatgggaaggaagaattagatctggctgagaagatggatattgctgtgtcttacacaggtgaagagctggattttgagactgttggagacatcattgccatcattgaggacaaggtagatgatcatcctgaagtgctggatgtggcagcagtggaagcagcactgtcattttgtgaagaaaatgatgatcctcagtccctgcctggcccctgggagcatcctatccagcaggagcgggacaagccagtacctctccctgcaccagaaatgacggtcaagcaagagagactggactttgaggaaacggaaaacaagggaatacatgaactggtggacatcagggagcccagtgcagagatcaaggtggaacctgcagaaccagagccagtcatttcaggagccgaaatagtagctggagttgttccagccacaagtatggagccaccagaactcaggagtcaggacttagatgaggaactgggaagtactgcagctggagagattcttgaagcagatgttgccattgggaaaggcgatgagactccacttacaaatgtgaagacagaggcatcccctgaaagcatgttgtctccatcacatggctcaaatcccattgaagatcctttagaggcagagactcagcacaagtttgaaatgtcagactcattgaaagaagaatcagggactatttttggaagccagataaaggatgccccaggtgaggatgaggaggaagatggtgtcagtgaagcggccagcctagaggagcctaaggaagaggatcaaggagaaggctacttgtcagaaatggataatgaacctcctgtgagcgagagtgatgatggcttcagcatacacaatgctacactgcagtcacacacactggcagactccatccccagcagccctgcttcttcacagttctctgtctgtagtgaggatcaggaagctattcaggcacagaaaatttggaagaaagccatcatgcttgtatggagagctgcagctaatcataggtatgccaatgtcttcctgcagcctgttacagatgacatagcacctggctaccacagcattgtgcagaggcctatggatttgtcaactattaagaaaaacatagaaaatggactgatccgaagcacagctgaatttcagcgtgacattatgctgatgtttcagaatgctgtaatgtacaatagctcagaccatgatgtctatcacatggcagtggagatgcagcgagatgtcttggaacagatccagcaattcttggccacgcagttgattatgcaaacatccgagtctgggatcagtgctaaaagtcttcgagggagagattctacccgcaaacaggatgcttcagagaaggatggaggaaccaggggacgccgctgtgccattgaagcagatatgaagatgaaaaagtgaagcctcagagttaccctctttgagccgaacctaaaataaaagtaaacaagatagagcttgggcttgcgggcccagttccagaggtggaagttacagaagaggaggtacctgggccacacgacatgagctggaaaatctctcttagagagttggagtagcacaattgcctgttttagggcagaaaccatgggctatgttaatgtcctaatgtgtagctagcagatcgtagctagtttgtattgtcttgtcaattgtacagactttttaaaaaaaacaaccaccagtgaaatgtgtgtgtatacaataaactgaaaaaaaaaactaaaaaaaaaaaaaaaaaaaaaaaaaaaaa

SEQ ID NO: 7238 - DNA, 1019 bp, Homo sapiens
  misc_feature (148)..(162): n is a, c, g, or t
ggacaggcagcctgctctgtgtcgccacgggccggatacgccacagggttgatggcagagacggccgagtccctggtctagaacaagacacattctttaaacactgtattacttctgcctccctctaggtgacagtggcagtccgggnnnnnnnnnnnnnnntgcagatggccatgcagggctcctgcccacgcaggccaccgtatgttcaggacacgcactgggtctcagagccactggcccaggcagaagtctccttgagcccactgggtcatatgcgtgtcaccacacgtgaactagtgtggtggctgcctgcggacaccctcctgttctgagccctgggcctgtgttcttctcagacactcccagactgaggggtggtgtgtggcgggtggcagggtggctgtggagactggggatctggagcctggtgctggcacctggcctgagtttccgtgggcagctggcggggacctgtgctgctgctgctgactgtgggtgggcgggcggcgcctgggagtggctcttgctcaggaattgataggaaccctaaaaactaggataccccctcctcggcccatgaggcacgcacagtgacttatttaagacttcccccttaatttatctgcccccaggatgcgtcagtctgttcagtggtcagcaggccccccaccccccgccgactgccctcgccatcgtggtcagacccccctcccaacacaacacgctgctggtctgtgtcagcctttgtaacgtgggaggctctgccgtgtcttccgggtgaactgtatttggattgcgcgcattgtcacggtccgcccctgggctgcaggcgccccttcctctgggcacccctgcattctgcatccccacctctagacgctgtaataaacagactgttttcactcggaaaaaaaaaaaaaaaaaaaaaaaaaaaaaaaaaaaaaaaaaaaaaaaaaaaaaaaaaaaaaaaaaaaaaaaaaaaaaaaaaaaaaaaaaaaaaaaaaaaaaaaaaaaaa

SEQ ID NO: 7239 - DNA, 3611 bp, Homo sapiens
tatgcatggagtggacctgtaggcgacttgcatcgtcttcaacatgaagatagccacagtgtcagtgcttctgcccttggctctttgcctcatacaagatgctgccagtaagaatgaagatcaggaaatgtgccatgaatttcaggcatttatgaaaaatggaaaactgttctgtccccaggataagaaattttttcaaagtcttgatggaataatgttcatcaataaatgtgccacgtgcaaaatgatactggaaaaagaagcaaaatcacagaagagggccaggcatttagcaagagctcccaaggctactgccccaacagagctgaattgtgatgattttaaaaaaggagaaagagatggggattttatctgtcctgattattatgaagctgtttgtggcacagatgggaaaacatatgacaacagatgtgcactgtgtgctgagaatgcgaaaaccgggtcccaaattggtgtaaaaagtgaaggggaatgtaagagcagtaatccagagcaggatgtatgcagtgcttttcggccctttgttagagatggaagacttggatgcacaagggaaaatgatcctgttcttggtcctgatgggaagacgcatggcaataagtgtgcaatgtgtgctgagctgtttttaaaagaagctgaaaatgccaagcgagagggtgaaactagaattcgacgaaatgctgaaaaggatttttgcaaggaatatgaaaaacaagtgagaaatggaaggcttttttgtacacgggagagtgatccagtccgtggccctgacggcaggatgcatggcaacaaatgtgccctgtgtgctgaaattttcaagcggcgtttttcagaggaaaacagtaaaacagatcaaaatttgggaaaagctgaagaaaaaactaaagttaaaagagaaattgtgaaactctgcagtcaatatcaaaatcaggcaaagaatggaatacttttctgtaccagagaaaatgaccctattcgtggtccagatgggaaaatgcatggcaacttgtgttccatgtgtcaagtctacttccaagcagaaaatgaagaaaagaaaaaggctgaagcacgagctagaaacaaaagagaatctggaaaagcaacctcatatgcagagctttgcaatgaatatcgaaagcttgtgaggaacggaaaacttgcttgcaccagagagaacgatcctatccagggcccagatgggaaagtgcacggcaacacctgctccatgtgtgaggtcttcttccaagcagaagaagaagaaaagaaaaagaaggaaggcgaatcaagaaacaaaagacaatctaagagtacagcttcctttgaggagttgtgtagtgaataccgcaaatccaggaaaaacggacggcttttttgcaccagagagaatgaccccatccagggcccagatgggaaaatgcatggcaacacctgctccatgtgtgaggccttctttcaacaagaagaaagagcaagagcaaaggctaaaagagaagctgcaaaggaaatctgcagtgaatttcgggaccaagtgaggaatggaacacttatatgcaccagggagcataatcctgtccgtggaccagatggcaaaatgcatggaaacaagtgtgccatgtgtgccagtgtgttcaaacttgaagaagaagagaagaaaaatgataaagaagaaaaagggaaagttgaggctgaaaaagttaagagagaagcagttcaggagctgtgcagtgaatatcgtcattatgtgaggaatggacgactcccctgtaccagagagaatgatcctattgagggtctagatgggaaaatccacggcaacacctgctccatgtgtgaagccttcttccagcaagaagcaaaagaaaaagaaagagctgaacccagagcaaaagtcaaaagagaagctgaaaaggagacatgcgatgaatttcggagacttttgcaaaatggaaaacttttctgcacaagagaaaatgatcctgtgcgtggcccagatggcaagacccatggcaacaagtgtgccatgtgtaaggcagtcttccagaaagaaaatgaggaaagaaagaggaaagaagaggaagatcagagaaatgctgcaggacatggttccagtggtggtggaggaggaaacactcaggacgaatgtgctgagtatcaggaacaaatgaaaaatggaagactcagctgtactcgggagagtgatcctgtacgtgatgctgatggcaaatcgtacaacaatcagtgtaccatgtgtaaagcaaaattggaaagagaagcagagagaaaaaatgagtattctcgctccagatcaaatgggactggatcagaatcagggaaggatacatgtgatgagtttagaagccaaatgaaaaatggaaaacttatctgcactcgagaaagtgaccctgtccggggtccagatggcaagacacatggtaataagtgtactatgtgtaaggaaaaactggaaagggaagcagctgaaaaaaaaaagaaagaggatgaagacaggagcaatacaggagaaaggagcaatacaggagaaaggagcaatgacaaagaggatctgtgtcgtgaatttcgaagcatgcagagaaatggaaagcttatctgcaccagagaaaataaccctgttcgaggcccatatggcaagatgcacatcaataaatgtgctatgtgtcagagcatctttgatcgagaagctaatgaaagaaaaaagaaagatgaagagaaatcaagtagcaagccctcaaataatgcaaaggatgagtgcagtgaatttcgaaactatataaggaacaatgaactcatctgccctagagagaatgacccagtgcacggtgctgatggaaagttctatacaaacaagtgctacatgtgcagagctgtctttctaacagaagctttggaaagggcaaagcttcaagaaaagccatcccatgttagagcttctcaagaggaagacagcccagactctttcagttctctggattctgagatgtgcaaagactaccgagtattgcccaggataggctatctttgtccaaaggatttaaagcctgtctgtggtgacgatggccaaacctacaacaatccttgcatgctctgtcatgaaaacctgatacgccaaacaaatacacacatccgcagtacagggaagtgtgaggagagcagcaccccaggaaccaccgcagccagcatgcccccgtctgacgaatgacaggaagattgttgaaagccatgagggaaaaaataaaccccagttctgaatcacctaccttcaccatctgtatatacaaagaattcttcggagcttgtcttatttgctatagaaaacaatacagagcttttgggaatggactcactgattttcagtcttttccatctctttcctcctagactctgtgatctgagggtataaagacatctccaccaagtctgagccctcaaaatgtcctgattacaatgctgtctgtccaactgcctgttcaataaaagtaaactcagcagaaaaaaaaaactgggatttctttgtcactatctggataatagatatttgcttttaaagaaactgaataaaatctacccttttg

SEQ ID NO: 7240 - DNA, 2606 bp, Homo sapiens
gaaatatgaagagacgctgcagctgcggtggcggtggcggccactgcagctcagagcggcgcacgcggcggccggggcgggacgcggggccgggcgcggagaagtcggggcgggcggcagagaggccgggacgcggaccgggccggggcgcccacagccgcccgacggcgcccagagagcgcgcgccccgcagccccgcgcctagcccgccgggcatggggcgcgcggcagccgcctgaagccccggcctggcccggccgcacccggccggaggggagggcagagcgcgcgcccagttgcccgggcaccaaatcggagcgcggcgtgcgggagggcccagagcaggactggaaatgtcctggccgcgccgcctcctgctcagatacctgttcccggccctcctgcttcacgggctgggagagggttctgccctccttcatccagacagcaggtctcatcctaggtccttagagaaaagtgcctggagggcttttaaggagtcacagtgccatcacatgctcaaacatctccacaatggtgcaaggatcacagtgcagatgccacctacaatcgagggccactgggtctccacaggctgtgaagtaaggtcaggcccagagttcatcacaaggtcctacagattctaccacaataacaccttcaaggcctaccaattttattatggcagcaaccggtgcacaaatcccacttatactctcatcatccggggcaagatccgcctccgccaggcctcctggatcatccgagggggcacggaagccgactaccagctgcacaacgtccaggtgatctgccacacagaggcggtggccgagaagctcggccagcaggtgaaccgcacatgcccgggcttcctcgcagacgggggtccctgggtgcaggacgtggcctatgacctctggcgagaggagaacggctgtgagtgcaccaaggccgtgaactttgccatgcatgaacttcagctcatccgggtggagaagcagtaccttcaccacaacctcgaccacctggtcgaggagctcttccttggtgacattcacactgatgccacccagaggatgttctaccggccctccagttaccagccccctctgcagaatgccaagaaccacgaccatgcctgcatcgcctgtcggatcatctatcggtcagacgagcaccaccctcccatcctgcccccaaaggcagacctgaccatcggcctgcacggggagtgggtgagccagcgctgtgaggtgcgccccgaagtcctcttcctcacccgccacttcatcttccatgacaacaacaacacctgggagggccactactaccactactcagacccggtgtgcaagcaccccaccttctccatctacgcccggggccgctacagccgcggcgtcctctcgtccagggtcatgggaggcaccgagttcgtgttcaaagtgaatcacatgaaggtcacccccatggatgcggccacagcctcactgctcaacgtcttcaacgggaatgagtgcggggccgagggctcctggcaggtgggcatccagcaggatgtgacccacaccaatggctgcgtggccctgggcatcaaactacctcacacggagtacgagatcttcaaaatggaacaggatgcccgggggcgctatctgctgttcaacggtcagaggcccagcgacgggtccagcccagacaggccagagaagagagccacgtcctaccagatgcccttggtccagtgtgcctcctcttcgccgagggcagaggacctcgcagaagacagtggaagcagcctgtatggccgggcccctgggaggcacacctggtccctgctgctggctgcacttgcctgccttgtccctctgctgcattggaacatccgcagatagaagttttagaaagttctatttttccaaaccaggattccttactattgacagatttgctttaccaaaagaaaagacatttattcttttgatgcacttgaatgccagagaactgtccttctttttctcctctccctccctcccagcccctgagtcatgaacagcaaggagtgtttgaagtttctgctttgaactccgtccagcctgatccctggcctgagcaacttcacaacagtaattgcactttaagacagcctagagttctggacgagcgtgtttggtagcagggatgaaagctagggcctcttatttttttctcttaattattattatatttctgagttaaacttagaagaaacaactatcaagctacaacttttcctgccattttcctgtggttgcagcctgtcttcctttgaaattgttttactctctgagttttatatgctggaatccaatgcagagttggtttgggactgtgatcaagacaccttttattaataaagaagagacacaggtgtagatatgtatatacaaaaagatgtacggtctggccaaaccaccttcccagcctttatgcaaaaaaaggggagaatcaaagctttcatttcagaaatgttgcgtggaaaagtatctgtaattaaagtttcgaagtaatttaaaaaaaaaaaaaaaaaaaaaaaaaaaaaaaaagaaaaaaaaaaaaaaaaa

SEQ ID NO: 7241 - DNA, 2783 bp, Homo sapiens
ttttttttttttttttttaggtgtctgccatgtgctgagacccttatattgacgggaatcctcactgcaacctgtaaggtatcagaactcgcattctaccactgaggaaactgaggttgagagaagtgaggtgacttactcaaactcactcaacaggaagtggcagagctggtgagtcttatttgcattctctgtcctggaacgtgggtctgcacaaagatcccagcccataggcagagccttctggagccttggctgcccccatatcccagccccttgaaaggcccatgagctgcacagttagtaggatctggctgcgggggggtggttagtagggcatgctcgggcctggttagtgggttagttggttggcagaaggccaggcacctcgtcacacgccacagcgtcccggctgagccctgggttagtaggttaatcacaccatgcaacactgccccggcccctccagctgcagcttcagaggcctcccgcccccaccagccagggagtggggcctgaccagggcagggggtctaactctaagccccccagccccatcaaaatcaaccctaaccacatggaccctgaccaaaagcatgttgcttccctatttattggctgtgggtctcagagcaccccctgcaaatatttcagctcccctgaaaatggaccctacttgtcctagacagaaaccccctgcctggttctggtcagccccttcccagagggctggatcctgttacactctgacagacacacgcacaccagcatctctccgcaaaagatctgacaaccgtgcttagtagacatctcttccatcaccgactgtcaggcctctagtttctccaactattggcctgccctcccaccattagaaaaaaaaaaaacgcatcaagctggcctcagccaatgctacaaagcacctaagtgtaccctaattatgccatcttctatcactgctgtacttttcccatagaaaccccagcctagcatctcccacagttctaaacgatgttccatgagaaaaagattctacggccataaaagtcaaggaacacttcatcctatgccctgtccctgagtatttgaaattgccattagcattttaaaggttctgataagtcctgcactacttcagtagtggggtcgaggtcgacgggtatcgataagttttttttttttttttttttaaaggagcaatgacatttcctagaagttactctaagaatttccctagagggtcgggtatcatctcagccagatctttctcatccttcaaggccctgtttggtacagcttgctaggaagctgttccagactgcagcagccctctctggggtctctctaccacttcccaggcactcagaacttgtgcctcagtagactgttttgtggcactgtcccattctctgattctccatgtgagctggttttatcccatccagcatggctgtgaaatcctaaaggttcaaaccccagccactcttcacctatatttcccccaaatggctagcacgggaaagggcccaaagtaggtgctcagtgctgatgagagagtagaatttaaataccccaggaagcattgtgagttactacggaggccatgaaatgctgccacctccccaagctgattaaagagtgatactaggaaaataggtagggaagggctaatcagaaatgcctctggttcacaagatgctgagttttaaagtccagagagccaaaaaaaaaaaaaaaaaaatagataaaccctaagtctatactcccagatggatgggagcatttgctgagcacctactgggagtcaggcactgtgctaggcacacaatctcactgaattctccctgcacctgacaggcaagcacattccttccatctcacagagcatcggaggctcagaggtgaagtaacttgcccagggttgtagcccaggcccttctcaggacacggctctcccagggcctccgcctccctgcactgagccctgccagttccatatgtcctccgaagcactcctgagccaccccagcatggtacctgccactccccgtgtctgcttcccatacctctctgctcctcttccccatccctgggtgggggcgggaattctgaaggggagaaggctctgactttccatgtttgcggtgaccaccctgttaagaactgaatggtgtcccctcccccaaatgcatatgttgaagcagtagcctgctatgtgactgtttttggagatgggacctttaaggggttaaggttaaatgaggtcataggtttaagccctaatatggtgatattagtgtctttataagaagaggaggagacaccagagcctgctcatgctctctgtccctctccacagagaaaaggccatgtgaggacatagtgagaaggtgccacctgcaagccaaggagagaggcctcaccagaaaccaagtcttaacaccttgatctggactttccagcctccagaactggcagaaaataaattcctgatgtttaagccatccagtctggcatggtgctgtggcagcccaagctgatgaatagtacacaccactccgcattctgggaaaaaggacatctggcttttaaacttgcctaagggaggccacaagctgctctcttgcaaacgctgctcttccaggtgacttccattttcccctctctctcccaatgccctgagatctattctgagcctattaaaagctcccaagcatccctggacatgtaggctgaaggtgaggcctggtccccagccctctcccagcctccctgccttgctc

SEQ ID NO: 7242 - DNA, 3420 bp, Homo sapiens
caagagctttcaaatagaactatggtggagaaaagtagtattgatgaaaattccatttctttagaaaaagaagtccgacatgtacaggaacaaaacttagacattttaaaaactgatcttcctcttaaatccttttctgaagaaatctatagtgaatcatgtgccctacttccaacctcatctgcagatatagaagaaactgatctttctgagaaaagttgtcctctagaaaatggaggcagaagttccatctcacatttgaaaaaagcagcaagtgaggaaaagcctttaggggttggtgaaatggaagaagaatgcactctagaaccagagttggcagcatttccaaagcaggatggtgggacacaggaatatacagatgccactttggaagaccacagaggtgatgttcaggaagctgacacactccatagacagctctccctgagtcagtgcttcccactcttgatgactgaagaacaacagaatccaggtgaacaaataagtacaaacattcatgcctctggagaagaaaaatgttatgaagaagttcaagttcagaatgaagcttctttctccactttagaaggagaaatgatagaaactagtttttctcaaaatattcctaaattagatgaggcacataccactgaggcagcagaatctgagacctccctaacacaatatttacttgctgctggaaagcgtgaggttcctgaaactaaagacaccagagaccaggcaaagcttgtccagagtgaatcaatcacttcaatggaggtggaagaagtaactttcaacactgtgtatgaatactacaaccagaaacaggaatcactaggtcgtccactttctcctgagtctgacatttccattggtgtgggaagtacaaccagtgaagaaatatctgagttagatcagttttataccccaccatcatctgttgaatattttgaatctccaaagtcccctgacttatattttaatccttcagatataactaaacaatcctcaatacattcaggaggtgagacagttgaaagatattccacacctttaggggaagttgctgaaagatattcaacaccttccgaaggtgaggtaggagaaagatactccacacccccaggggagacactagagagatactccacacctccaggagagactctagagagatattccacacccccaggggaggcactagagagatattctattcctactggaggaccaaaccccactggtacttttaaaacatatccatcaaaaatagaaagggaagacggtacaccaaatgagcatttctacacacctacagaagagaggggttcagcttatgaaatatggcgttccgattcatttggtacacccaatgaagccattgagccaaaagacaatgaaatgcctccatcttttattgaacctctgaccaaaaggaaggtatatgaaaacacaacactaggcttcattgttgaagttgaaggtcttccagttcctggtgtgaaatggtatcgaaataaatctttactagagccagatgaaagaatcaaaatggaaagagtgggtaatgtgtgttcactggaaatttctaacattcaaaaaggagaagggggagagtacatgtgtcatgctgtaaacatcataggggaagcaaagagctttgcaaatgtagacataatgccccaggaagaaagagtggtggcactaccacctccagtaacacatcagcatgtcatggagtttgatttggaacacaccacatcatcaagaacaccttctcctcaagaaattgtcctggaagttgaattaagtgaaaaagacgttaaagaatttgagaagcaggtgaaaatagtgacagttcccgattttactcctgaccataaaagtatgattgtgagtctagatgttcttccatttaattttgtagatccaaatatggattcaagggagggagaagacaaagaactaaaaattgatttagaagtatttgaaatgcctcctcgctttataatgcctatttgtgattttaaaattccagaaaattcagatgctgtattcaaatgttcagtcatagggatcccgactcccgaagttaagtggtataaagaatatatgtgtattgagccagataatattaaatacgtgattagcgaggagaagggaagtcacactcttaaaattcgaaatgtctgtctttctgatagtgcacaatacaaggtgcagagctgtgaatggtgtaggagaggctatctgtcggggattcctcaccatgggagattctgaaatatttgctgtgatagcaaagaaaagcaaagtgactttaagcagtttaatggaagaattggtcttaaagagcaactacacagacagtttttttgaatttcaggtggtggaagggcctcccaggtttatcaaaggtatttctgactgttatgcaccaataggtacagcagcatattttcagtgcttagttcgtggctctccaagacccacggtttactggtacaaagatggaaaattagtccaaggaagaaggttcactgttgaggaaagtggcacagggttccataacctgtttataacaagcttagtaaagagtgatgaaggagagtataggtgtgtagctacaaacaaatcaggaatggctgagagctttgcagcactcaccttaacttaaaatgtaatgttttagtgcctcagtaattattagcattgatctgagtgctttcatattttccaaattatgtggatctaataaacttccaaacaggtccaccatatttgaattcattaccttggagacccctaaagaaataatctctatgtagaaatctcatctttgtaatacatgtaaatattttgttatctgaactgtggaatcatcacttgtgtcaatcatgctgtgtaatatcaaacacaattaaatctctccttggctacctaattgtttgtacttctatttaccctcatgcctcctccacaaagtgtttcagtggaatggactctcttttagcagataaaccatatatgcaaaagtacaatgtaaaagtggagaccatatcagatgaccacgcagacaaattggtaagggcaaatctctctgctcccattctaagttatttttggaattttaacccctttgcatccaaactcatgtttatttactttgacttagaataggcaaaacaaacaacaaaaaccagcttctcccaattggcaactaactctataatctgttttacatttcaatcttaatatattaacttcatctcttttaaaaatgttttcgttattaatattcctcttcataagtgctttaattctcactggcttcaagggaccaattgtgctctttgtgggcagggttcacctagacatttgcaaaataagcaaatagatctttccacttttggagat

SEQ ID NO: 7243 - DNA, 3722 bp, Homo sapiens
  misc_feature (1571)..(1588): n is a, c, g, or t
gctgcaccagcacctcttgctccacatctccagagagcccagggccctgtggccgagtgtgtccagcccagtgtcatggggagcttccatatctcatggctccttgctgggccaagccctccagaaccccaaacccccaaagactgatgaatgccagagtggccaccttgcttatctgtggccccggccctggtgatcaccatggcagctggaaagggagccccgttgagcccatcggctgaaaacagatggcgacttagcgaacctgagctgggccggggctgcaagccagtgctgctcgagaagacgaaccgcctgggccctgaggctgctgtgggcagagcgccttcacggagctgccgaggatgaaggaccggcaggtggatgctcaggcccaggagagggagcacgatgaccccacaggccaacctggtgccccacagctgacccagaacatccccagaggcccagctggcagcaaagtcttctctgtgtggcccagcggagcacgaagtgagcaaagaagcgcctttagcaaaccaaccaagcgaccagcagagaggcctgagctaacctcagtcttccctgcaggggaatctgcagatgccctgggggagctgtctggactcctcaacactacagacctcgcttgttggggtcgactttcaactcccaagcttttggttggtgatttgtggaacttgcaagcattgccacagaatgctccactctgtagcacttttctgggtgcccctacactgtggctggagcatacccaggcccaggtgcccccaccctcatcatcctccaccacttcgtgggccctcctgccacccaccctcacctccctgggcttgtccacccagaactggtgtgcaaagtgcaacctgtcctttcgcctaacgtccgacctggtctttcacatgcgatcccaccacaaaaaggagcatgcggggcctgacccacattctcagaagcggagagaagaggcccttgcctgccctgtgtgccaggagcacttccgggagcgccaccacctctcccggcacatgacttctcacagctagcaggtgaccgcagaatgacctgctgggtgcagcagccagcctttggcagaggggggctccctgggcctgcgttgagggggctgtcatggtcctttgcagagctgctgcttttggcattcatagataaacagctcaggcataatttgaaaaagccacacctgcatgatgtgttttgaaggaaatgaagtcctgaaataaagtgatgggctttgcaaatccagggtagaggccctaacaggcacagagagcaggggcaactcctggcacacatcatgggctttggaggcacacaagcctggattcgaatctgggctctttcacatactagctgtgaccctggacaaagagctttaacctgctgagtccccattttctcatctgtgaaatggagatgataacactgtgtcttaggttggcattcaggtcacatgaaaggtgtgtggaaagtggccagcattctgcctgcagaccctgagcactgagtcaacaaggtttgtgatgatnnnnnnnnnnnnnnnnnnttgttattaacaagatctccatggcagacaagctaaagcatctgcctaagtcgtgagtctgtgggttggctcaggttaagctgagcttggctgggcttggcagcaagtctcagatttgatcaagtcatattcgttttcttcttcggctggtgggctacccagagcgagcacgcttctctcgtggtcatgccaagaacacaggagggtgagtctaacaagcacacctcaagcctctgcttgggtcacattgccaatgtcctctcagcccatacaagtggcaggaccaggcccaatattaaggagtggaaaagtgtaggctgcccttggtgaagctgtgacaagggagtgaccatccatcccctccacaggagggtgaggaattgggacaggtaattccagccaatacctggtccatagttcttcacattgtgagtatatgaatacggggaaatagaaccccctccccaccacctacacacatgctgttttaccttccaagaataggacatgtgcaaaaactaggcttccagatcgtgaggctggggagcattctaggtaccatttattatctactgcgtttcggtcagtagctgttgtaggtacccgcatcagcccttgttcctaaggatgtgtggagcccaggctgtactctttgacattccacaggtcagtctgcgtgaaagccctttgtggggagtttccaagccagtgtcgtttttgcactggtttccacctcactgtcagatattgttcttttgatatgcagtttccagccctccaatgagtccccagcacagatctcaggcttgtggctgggaataagcccagctgagcaggtggggatctcagccagcctcccagactgcacctcttctattgctctcctctgtccaccgttccaggcagcagcactcccacctggctgctctgatgtcctcgctccctccattcctgcctctcaccatgcacgcatccattgtccacacacacacaaccagataatcttctgaaagtgtaactcagatgatgcctccaaccctgtggctgcccttcacacttacaggcctaaccccagcaggacctgccagctgcttcatgaacaagtccctgcctcatgttaattgcaagcactcatttcactctccctgtgtgccaggcaatagcataagcactggaagaatacagatgttatagtgagtcctacaatagccctggaaggcaagagctgtttcctttccatttctacaatgagtcaattgcagatgatgctataacacttccagtgtttctgacacttccctgaagctatacctgctaccttcatgggccgagcttgcccttatgaggcccacaggtggcagtgggcagaggggaccccgctataccacctcgctgctgttccactgtctgctcccgtgttctgaccacagctctggtgccgtttctcaagcctgggcttcattcaacattttctatctagctcttcatggtgctgctcctgctatggttccacagggcttcttctcgcaggtcagctccttagagaggtctcccagattccccgtaaagcagccctgcagcctctgcctctctcagccgcatcaccctgttgcttccttcacagcatgtctcaccatctgcaaccatctttctgtttgtcgtcttgttgatttgctgcctccacactgtcagctccttgggaacagagattggtttgtttactgtgcatccctggtgcccagaacagggcatggcatattgttggtgcataataaatattgtggaaataaaaaaaaaaaaaaaaaaaaaaaaaaaaagagggcggggcgcggccaaagtttccccaggcgggccaggtatagggcctaaccacgttctctgggcacgggggcccaagggggggcggataaaggacaggcgggggcggtcaacacggtgcgcggaaaccgtccgctggatccgggaagggaccattccgctgcggcatcttggaccccccgcagtagctcgggatcaacctcggtcggtgacccgatttggggaagtgtcggtattatacaccggtccgatccgcaagcacaaagtcagaacgagacacagcagcaaggaagcccaatcaacgaacgacgctcac

SEQ ID NO: 7244 - DNA, 3679 bp, Homo sapiens
ggctttatctgggaaccacagacagaatcatggaactgaccatcttcagtctcaaagtgctgccctcaccactacacccaagggcaggtggtcttcgggggaaaggcggttccagttccttctcccaagccagtgaggaagtcaatcctgcgaacaactgcaggaacggccttgggagtggatccttcctcagcccggctccaagacaactgcagccctgtgagaaaccctgagtggaggaccaagccaagcctcaaatcgtgacttggaactaatctgctgctcagaaggccaggccccttctgaagagggatctcttcctacacagtgacagaatctaggatctggggaaggtaaactgaggccaccagtaagcatgtgctccaggccaaggctgagtctgtgctgcatccatgtcatcagccacccaagaaaaaccagttactccacctagctcatggtggcggcatcctccctgcaatggtgcatggggggcagtcctttcccctgcagggtgtcattgccacccccatcctcatcctggaggccagtccaggctccgatatgagtgactaggggtgaggtaggggtggcagaagggagatcaaactggagcattccagatgcctactactgccctcacacaacggggcaactgtgctctccaactcctccccttggcagagaaactggtcctgcagtttcaggactagacgagcgtggggtagtggcaataaaggggcttgtatgagaagtgaaaaaaaaaaaaaaaccctaggggcaaaaagtgaatcatctaactggtccaagtcactaatggcaatccttcttccccaagaagactgagtttcctttgtcacttcaggaagggaagaagagaggttagctgagccacccagattaggcccagatttagccaccacctagaacagggcaagctggaagtgaaagaacttgaaatactgactttttccttcttaaaaaagacctaacattgtaatggtttagcaaaattgttataatttcttttaaataacccacagacacccatgacacttccaaatttacagagcaaaaaagtgatttgcagctggttcctccagggaattggccccgaaggctggctcagttcacctccaggacctcagtctccgggaggccgaacttggtcttgtgcttgtcgaagagcttcaccagggcctccatgtacatggtgtggtacaggtcgatgtcttgctgggttgggtgctccagcttggggatggtgatgggctctcccacaacagtggtgatgggcttggagtagggcaccagcccccaggtgtcggaggagaagaggcctcgaccatggaagatgcatggggcgaaaccaatgtatttctggaacttcttctggacccatcggccccaggagccctcctcgaagatcacctgcttgtacacttcattctctccaaaggagtagatgggaaccaggtcagctccatgacgcagggccagtttcacaaagcccttgcggttccgcagggtgactgcattcttgccaggcatggagctcagagactcagccgcacccccgaccacgatgatgatagcattgccactcccattctttgaaagcaaatagtctatggtgtcccggctgacagggcagatacctgaggggagggaaggacgcaacagtcagggttgcccatggatccactccccatccccggcacacagtcaggtataaaacataaagaaccctggacctgggccccagacctagcccagcccctttggagttgtctggttctgtgtaagctattcatttttctgagcctcagtttcctcatctgtaaaatgcagctaatgatacaaggttgttttgggaactcatgcatttggcaaacattcccagggccctaattctgccaagtcggtgcgaggtgttggggatcccaatgcatcagtctggtgggaggtctcaggcaggtggacgattacagtgccatggacaacaatcaggttgtacaaaaggcaacacaagggctgggggtccccagaaaagggggtcaaagaaggcctcctagggaagatgttatccgagttgaattctcaagaccatatggacagctctcctcctcagccctgacccaccatgtctgaagcaggttgcatctcccaatgcaggcccagcaccaaggaatggtgtgttggctccctgtgtcaccctgcccgatggagaggctcaggccttgacaacagtgcccagcaggagcacagggggtggattcttacctccagacatcaggtactccctcaacacaggcattcggaagttgcctgccagtgtagccaggtaaggccgtatgcctgggaacttcttgctcacttctgtggcctctgtgctgaagttgcagaaggcacccaggcccatgataccatgggggtggtatccaaagatatagttcctggtggtcagcaggttgtgtgtcttcaccagctgcaaggatgaccttgggtcagaggaaactggctgggagagggataccggggcatacccggagggtagggagggattggatgtgtcatttcccctggacctccatgggcctgagggctgcaatgaatctccacaccttacctcagactctcatccccagggccacagtgctggtgttgggcagtcaccatttgcactgtgggtctctgggaaggggtgggcaatgtttgcccttgttcctctcagtcttcagccatgcacacagcagctcttctttgcactctgccagcctcctgccttccctccctctgggcccatccttttcgcaacagccagagtgattattctaaaactcaaatccaacccttgtcactcttagactggagagtgtgtctggcttcatgtgagtaaagtccaagttcctgagtttggcaaccggggccttggctgcaagctctgcccccactgtcagtctctccaaactgtgagctccttggaggtagggtttacttggccctgtgctctgtgggctcctccacagctcacagaatgagacaggcagcccacctcctactcccctggcctggaaaagggacactgcagctggcccaaatggaaactttcccacagtcagctgggctcagttcaggttctaaggcaggaaggacaagacaggacaagcgacagccctgtgccagccagcctggggtagaggttagttgtaaggctgcagcagctgaggacctgacctgtggtactaaggacactgggatgctctaaacgatgattggcttcctcagggcccacctcctgccctggggctggtgcttgaaggggtgggtgatgcagtgtccctaaaccctgagtcatgagaggcaaagcctgtgacacctaccctgtgttacaaggaatgtgatgggggtggaagaggctgagagagacaatgagtaagggtattctgctcataaaaacatcatttttattctgattagaaaaataatagggccaggcatggtggctcatgcctgttatcccaacactttgggaggccaaggtgggaggattgcttcagctcaggagtttgagaccagcctgggcaacatggtgaaacgcttatctctacaaaaatacagaaattaactgggcatggtggcacgcacctgtggtcccagctactcaggaggctgaggt

SEQ ID NO: 7245 - DNA, 1775 bp, Homo sapiens
  misc_feature (51)..(51): n is a, c, g, or t
  misc_feature (1598)..(1618): n is a, c, g, or t
ggaaaatcagctgtggtttttattattaaccctttctttttcagtggtttnggaattctagctctattcctcctggcttaaaatttgagggcatagaattcacaagagtttttgaagagttctgtctattcaggctttcctttgtccccaccctagtgtcattttcactcactcccatttctacacataagtattaaaaaggatgtatttattataattcgctagtactgattggtaagcctcataattggcctttgttatctttgtactgtgacgaaggcagtggatgatacattaccaatcattgccgaagataacctcttctatctttttgacccaactacccttattaaaactatcaggtaaaatattggagttaggtttttaaagtcattgggctgtggcagtgtgcttagaaaagaaaatggtggaacatagaatattcttttggtcactacacaatgtgttacttatacatggcagggaagggaattttaaatcaaactcgcagtttggttcttaggtcctctgctgatgaattctcgctctatcagggaatgatatgtgacgccagccttaggaacctggtgttcaactgtaaatctttctatttagctttttgtattagttgaatgaagttatagaatatgaattattgaatacagttctgttcagccaataggcacttgatatacagaatggtaaatttaaatataaattaaatttttctaatattatgatcagcacttcactgtggttctgtgtctttaaccacctcataataagaactgttattgaggactgggctacagaatgtgcttagactacatctatggcttccatagattttagtaaaatttaaacagataatttgtgtttactgctgatgttactttaatattgaattagtagttcatcctgagagttatatttcacagaggaaaataaccaacagctgaaaacaacaataataaagctctggtgagtctgactcatactcggagaaagtttttggaatacatacacatttggtgcatataagagttgggtttccttttcccactttctgagatgtactaacctctgccagacccttaaatgattttgttatgttttgcatttttgaggccaaccttattttgtaactgaaaaaagtccagttttgcatacacagaaatttggtcattttagaagtctcacaacctgaataatttgataataattgaatatgctattaacagctttttaagaaaaggttctattagtcagttttttccttgtctgtcatattatgttggttaatgtctcttatggccaatcttagtaaacagacctaacactcactgcatccttttgtgccttactttttactttccttttgcccttttggtatgtgcgcatgtaagatggtaagtttaaggctaatgaatatatgtttgtaatttcctactcactactctgcagttaaagctaaggccttaggcaaaatctagaaatgtttatattgttttgttttttatcaagtggtgtcaacttgagaaatacaaagaaaggctatgcttaactgtataaccgtgggggatttagcatgagaattnnnnnnnnnnnnnnnnnnnnnctaacctgttttaccaaaaggaaaagatgtttccaaaaatgttttcggtgtagactgtttaaagatgaaaataaattatataatttattatatgaaataaatttttgataagtcaaaaaaaaaaaaaaaaaaaaaaaaaaaaaaaaaagggcggccg

SEQ ID NO: 7246 - DNA, 1071 bp, Homo sapiens
  misc_feature (228)..(270): n is a, c, g, or t
  misc_feature (581)..(581): n is a, c, g, or t
gacgccagcagcctgatgaggcagacccatcttggcaatggatatgacccccaaagtcaccagatcacgagctgctgcagccccatcacgactgctgccaacgccaggagcagcctgctgctgtgggccagtcaggggtgaggagagcccccgacagtcctgtcctggaagcagtgtgggaccctccatttcactcagggcccccatgctgcttgggccttgtgccannnnnnnnnnnnnnnnnnnnnnnnnnnnnnnnnnnnnnnnnnnggagactggtgtccccagcaccccgtaggggcctacgtaggacaggaacctggaatgcagctctccccggggccactggtgcgtgtgtcatttgaaacaccacctctcacaatttaggcagaagctgatatcccagaaagactatatattgttttttttttttaaaaaaaaaagagaaaattggtatttatttttctattatagccatatttatatatttatgcacttgtaaataaatgtatatgttttataattctggagagacataaggagtcctacccgttgaggttggagagggaaaataaagaagntgccacttaacaggagtcacccaggaaagcaccgcacaggctggcgcgggacagactcctaacctggggcctctgcagtggcaggcgaggctgcaggaggcccacagataagctggcaagaggaaggatcccaggcacatggttcatcacgagcatgagggaacagcaaggggcacggtatcacagcctggagacacccacacagatggctggatccggtgctacgggaaacattttcctaagatgcccatgagaacagaccaagatgtgtacagcactatgagcattaaaaaaccttccagaatcaataatccgtggcaacatatctctgtaaaaacaaacactgtaacttctaaataaatgtttagtcttccctgtaaccttcaaaaaaaaaaaaaaatgagtcagcattttctttacatgttagaattcagtctctgagtatttgaagaaaataccacttacaatattttcaggtccatcagaaatg

SEQ ID NO: 7247 - DNA, 1198 bp, Homo sapiens
  misc_feature (130)..(130): n is a, c, g, or t
ggcgggggacgggagccacaccacctggggctccggagacacgcttcggtcggcctgcggaccgtagagcctcacaggagaggctggctcgagtggctggcggctgcaggacacacaggacaagctcttntgggactcccagggtggcggctacttctgcagtgaggctgagctgggggctggcctgcccctgcgtctgaaggacgaccaggatggagcagagcccagcgccaattccgtgtcagcccacaacctgcttcggtctgcatggcttcacgggccacaaggactggatggacaagtgtgtgtgcctattgaccgccttttccgagcgcatgcgtcgtgtcccggtggcgttgccagagatggtccgcacccactcaccctagaataaacttaacagtgtcccgtggggggcagtgagtatggccaaggacaccaaggccctggttgcagtgcgtccactctgtctacattcctaacaaggtgctgattctggctgatggggacccctcgagcttcctgtcccgccagctgcctttcctgagtaccctccgacggttggaagaccaggccactgcatatgtgtgtgagaatcaagcctgctcagtgcccatcactgatccctgcgaattacgaaaactactacatccatgactgccccaacccccttggggtggggcagaaggtgaagcatcccaactgactagagactcaggccctgcagggccctatagaacctgtggccatccctgagcaccctgccaccaggtgacctcggccatactcactgccccccttgggcacccactcaccctagaataaccttaacagtgtcccgtggtaaaaaaaaaaaaaaaaaaaaaaaaaaaaaaaaaaaaaaaaaaaaaaaaaaagaaaaaaacacaggggagcaaaaaagcgaaaaccaaacaaagaggggaacgggggccgccaaaaaaatagacccgcaggagcgagcaaacagaacaaccgcacgcaagatttatactagcagaaagacgatcagcacaaaaacgggccaagcaacacactccggccccaggaacccgctaaaaacaaaaagacaacaaagaagaaacacgtcacgtcagaatgaagggcacaaccacaacggcggagcgaacaaaatgcgcacacacacaacaaaaacacccgcgcaaaaacacccgagtcc

SEQ ID NO: 7248 - DNA, 665 bp, Homo sapiens
gttcgactttttttttttttcaatagtctactgtttttatttgtggaagggttggtcttataggaactattctgccagtagcagaagtggaaactcagatttccatattttagaaagtattctaaaggagtgttgagaatggatctgaaatgagactagggatagagaaaccagtcaggatatatagcagccacccagggaaaaggtaatgagagttcacagaacagcagcaatcaagtgcaatgaaagtttgtatttgcaagctccagactcttaaattccaactctgcagtaaaatagctaaaaacagtctgaactaaaatatcaagagtttttggatagagatgtaggttgtggtgagaggggaggcaatgatcttgagtggtattttcctatgaagtgtgagaagggaagtggaccagaggttgaaccctggagaagaggcagggagtgataggccaaccagggtagctaagaaaagtcagagaagctggaaactggttgtgatgacactgagactagaaagttgtggccagacccggtagcttatgcctgtaatccaaatgttttcggaggccgaggcgggtggatcacccgaggtcaggagtttgagaccggcctgacgaatgtggtgaaacaccatctctactaaaaaaaaaaaaaaa

SEQ ID NO: 7249 - DNA, 3429 bp, Homo sapiens
  misc_feature (1597)..(1620): n is a, c, g, or t
gtccggtgatttttatgaacgcctgtcttagtagcagcattgtagagtggctggagcactggactgactaggaacctgatgacttcagctgtagtccagctttgccaccacttcaagtcatttaaccagtctgctcctccgtttctccatctgtcaaatgggagctttagacaagatgatctcaaatttccttcccactctaacagttacgatttctacagcaaatcttgtgagaaggaaatgccagcccagtaccatttcataaaaagcagctcaaaggaaatagatctgtgcttgtttctaccaatcttggcagaaatacattagcttgtcccaattttgctttggtgattggatcctgcccttccctcctttctattttccctatacttttctaatcattaggtaaactggcagttgaggatacaatttccacatcacagagaggaactagtcaggtgataaatgattaaagtgacagtggttccctgtgtgattgtgatgtaatccctcctggtgagtctccatcctgccggttgatgctcaagtctgtttcactactcttttgtgtgtctcacagcccatagctcagctgtgagctgcaatgactctgcacatctttttttccctttgggaatgcataacatccatgaaagccacatgctttgcatatagtggaggcccagtgatggttgttggaattcaaagtagtaaaggctctagaattgttggaagaatctggaaagcagattcttcccaggaaataggcatgatggggtgtgaaaggaaggttgccacaagggaaaatggctagacttgtgcaaaagaatgaatggacaaaagatcaccaaggggttttggtcccattacgaagtgagtgtttaactagtagagccactgagatggaagatacaccttacttcttgggaagtagtgagttcccatcgccagtggtttgtagataacagaccctgtttcagtccacttggaagagatactgtagcaggaattcttaagcaggattgaacgtataataagcaagatctcttccacctctaaaattctctggttgtgggtattgagagctacataataataatagcacctgacatttttcacatttctggagcatttactatgcaccaggaactgttcaagactttccatttaatcctcacaacagttgcataggtaggtgctgttattattcctccctcatatatgaggagactgcagcacagcacctaagattgcatggctgtgggtagtggaggtagaattggaacccaggctttggctgtcaggctacactctcaccctgtgtactgccgcccgagcagagcagtgtaccatcagcctcggcatccatggatttcaccaaccatggaccaaagatatttggaaaaaaaaaatgcaacaataggaacaataatacaaaatatatatatatatgtgtatatatatagcatatatatatattttgtattattgtttttataatatatatagcatatatattatatatgctaaaatatatatatagcatatatatacacacacatatatatatatacacatatatatatatatatacacnnnnnnnnnnnnnnnnnnnnnnnnacatatatatatatatatggccaggcacagtggctcatacctgtaatcccagcactttggaaggccgaggagggaggatcacttgaggccaggggctcaagaccagcctggtcaacatagcaagaaaataaaaaataaattctacaaaaaaatttttttaaatagagtataataactatttatatagtgtttacattgtcttagatattataagtaatttagagatgatttaaagtatacaggaggatgtgcataggttatttgtaaatactataccattttatatcagagatttgagcacctgcagatttcagtgtccatggacagtcctggaaccggtaccctgtggatactgcaggaggtctgtacttttttataggaaggtcaaaatctcaaactgagatggcactcctttattctgctgtagaactgtaatttgggatgtcagtgtgggattcaggaagtatcatgaatgactgctatgtaatttttctttatattcctatccttctagataatttttcattattttctagtcatggaactatatctttgttaaacttattggaaataaaatacccaagaatttttgctctctttctctctttatcagattaatagaactgaatctctgacattccaaattaatcctgctctttaaagaaattttcttttaggctcttcattacaaactattcttgctgatcaaattccacgtaatgtctgaggaaaacagattccactggcagttgcttttgttacatttgagtggagaaatttccttggtcattacaccaaaatattgaccagaaaggtcctgttgctcctcaacttcaggggaaacaatagggttcaggtctgaaactcagacttgtttgagaaagataatgtgctttctttccttcttagggtgtgagatgaactagaacatttcaatatcttgagcgtccaacaaaatgctacttgggcaatctgagccaatgattatgccaagttctttgtaggagaggaattggcttgaaaactttatcttctttctcagtgtatctatggtggaagaacactggatcaaggaactctaaataataattcttggagcagctatttcaaatcttattcttacatgctaatagaaaaaagataggattattatttcctccctcactcagaatgcagtgataactaccaaataaaccaatgtgaaagagtcagttgtcttggacaccatctctacttcagataaatctgggtgcatagcttgagccagtaatttgggctaaagtgtgtttcggacttagaaatttgtgcaatagtcaactgtctaaagcagtgttgttcaaatagaactataatgtgagacacacaagtattttaaaattttctagtagctaccttaaaaaagtaaaaagaaatgtgaaattaattttaaggacttaacccaatatgttgcaaaatataatttcaacatgtattcaatataaaaattattagatattttaggctgggcacggtgactcacgccagcactttcggagtaatcccagcactttcggaggccaaggcgggcggatcacaaggtcaggagatcgagaccatcctggctaacacggtgaaaccccgtttctactaaaaatacaaaaattagctgggcatggtggccggtgcctgtagtcccagctatttgggacgctgaggcaggagaatggcgtgaacccggagggcagagcttgcagtgagccgagatcgcgccactgcactccagcctgggcaacagagcgagactccatctcaaaaaaaaaaaaaaaaaaa

SEQ ID NO: 7250 - DNA, 3563 bp, Homo sapiens
  misc_feature (1735)..(1750): n is a, c, g, or t
atcgagcttcagattgtttactatttaagatgtacttttacaaaggaacaaagaagggaaaaggtatttttgtttttgttgtttggtctgttatcatcaataacctgttcatatgccaattcagagaggtggactccaggttcaggagggagaagagcaaagccgcttcctctctgtgctttgaaacttcacaccctcacggtggcagctgtgtatggaccagtgccctccgcagacagctcacaaaaccagttgaggtgcactaaagggacatgaggtagaatggatgcttccatcacagtaccatcattcagaataactcttccaatttctgctttcagacatgctgcaggtcctcatctgaactgttgggttcgtttttttttttttttttcctgctccaagaaagtgacttcaaaaataactgatcaggatagattattttattttactttttaacactccttctccccttttcccactgaaccaaaaagaaatcccatccctaaaacctgccttctccttttatgcaaaactgaaaatggcaatacattattatagccataatggtatagatagtgattgcgtttggctatgtgttgttttctttttttttaaattatgaatatgtgtaaaatctgaggtaacttgctaacgtgaatggtcatataactttaaagatatatttataattatttaatgacatttggacccttgaaacatttcttagtgtattgatatgttgacttcggtctctaaagtgctctttattaaataacaaatttcttcagtggtctagagccatatctgaaatattgctaagcaatttcagttcatccaggcacaatgtgattttaaaaatacttccatctccaatatttagatatagattgttttgtgatgtatgaggaatgtatgttagtcttccagatctttgaatgcctctaacacagctttgccttctaaagcggtaattagggatttaaaaaacaacctttagccctttatcagcatgaaatgcttgagtgatgtggttttctaatttctttggggtaattatgactcttgtcatattaaaaagacaagcacaagtaaatcattgaactacagaaaaatgttctgtggtttcatagttaagcaaaactctaaatcgccaggcttcatagcaaagacatagtcagctaaaagccgcacatgtggatagagggttcaattatgagacacctagtacaggagagcaaaattgcaccagagattcttaaccaaccagccttaccaaacaacacaacaggggaaccccaatctgccttacccaaggccccactggcagctttccacagaatttgcatttagaggagcagaatgacatcactgtcctttgggagtaggtcctctgaaaaggcagcaggttccagcaggtagctgagctgagaggacatatggcccacggggacctacagacagcctttgacatttgtatttcttacaatggagggccaaggagggcaaggggctgtggagtttggtgtctactagtgtgtatgaatttgagctagagtccttctgtggcatgcactttgaccactcctggcagtcacatggcagatttccaagtgcaaatccttaatccaaacaaggatcatctaatgacaccaccaggccaatccctgctctcctccccgaaaagtcagggtcccttcattggaatcctccacccacccaagcagaatttagnnnnnnnnnnnnnnnnaaccctaacggcccccttgttctctggtccttctcaaacccacctttgtaggccacccagcattgcaggacagcgtgtggggcagctggacctgtgcttcctgcctgggagtctcccttggaattcatcctgactccttctaataaaaatggatgggaaagcaaaacactttgccttctaaaggccgtataccaagtatgcttagataaataagccacttttctattacttaagtaagaaggaagtagtaattgatactatttattgtttgtgtgtggtagcttgaagcacaccactgtccatttatttgtaagtgtaaaatatgtgtgtttgtttcagcagcacttaaaaaagccagtgtctggttacacatttcaattttaattaattgacataaaaatgctaccgccagtgccagctgcatcctatttaattaaaaaggtactatatttgtacattattttttaatgttaaaagggcttttttaagtttacagtacacataccgagtgactttagggatgcttttgtgttgaaatgttactatagtggctgcaggcagcaacccagaaacactttagaagctttttttccttgggaaaaattcaagcacttcttccctccaccctcactccaaccaccccaatgggggtaattcacatttcttagaacaaattctgcccttttttggtctagggattaaaattttgtttttctttctttctttttttttttttttcactgaacccttaatttgcactgggtcatgtgtttgatttgtgatttcaagaccaaagcaaagtcttactactactgtggaaccatgtactagttcctgggaattaaaatagcgtggttctctttgtagcacaaacattgctggaatttgcagtcttttcaatgcagccacatttttatccatttcagttgtctcacaaattttaacccatatcagagttccagaacaggtaccacagctttggttttagattagtggaataacattcagcccagaactgagaaactcaacagattaactatcgtttgctctttagacggtctcactgcctctcacttgccagagccctttcaaaatgagcagagaagtccacaccattagggaccatctgtgataaattcagaagggaggagatgtgtgtacagctttaaggattccctcaattccgaggaaagggactggcccagaatccaggttaatacatggaaacacgaagcattagcaaaagtaataattatacctatggtatttgaaagaacaataataaaagacacttcttccaaaccttgaatttgttgtttttagaaaacgaatgcatttaaaaatattttctatgtgagaattttttagatgtgtgtttacttcatgtttacaaataactgtttgctttttaatgcagtactttgaaatatatcagccaaaaccataacttacaataatttcttaggtattctgaataaaattccatttcttttggatatgctttaccattcttaggtttctgtggaacaaaaatatttgtagcattttgtgtaaatacaagctttcatttttattttttccaattgctattgcccaagaattgctttccatgcacatattgtaaaaattccgctttgtgccacaggtcatgattgtggatgagtttactcttaacttcaaagggactatttgtattgtatgttgcaactgtaaattgaattatttggcatttttctcatgattgtaatattaatttgaagtttgaatttaattttcaataaaatggcttttttggttttgaaaaaaaaaaaaa

SEQ ID NO: 7251 - DNA, 3373 bp, Homo sapiens
  misc_feature (1618)..(1653): n is a, c, g, or t
  misc_feature (3325)..(3339): n is a, c, g, or t
aggtttgcaggtgcagaaattagcatctagtgtcacaggtaaaagaatttcaggaccaggtttaaactttattttaaatatttttaaaaggaggtttttttttccggcctctccccaaagaaggcccccgggccctaggtggttggagcttactgcttatattatagagtgtaaataggtaactagagactaaaattttattaaccagcatgtttggtatatttaaagcagtgactgagtgtgtttgagtgagtggctgagtgcagtgtcttttgtttaaacacactgcctcgtgtctttgtagctgattcagagagtttgaattgtggggtgggagactaacttcagctccaggctgcagtaatgtgttggtagttacacttgaggcatttttttgttgttgttaattaactctatagtctcaaactatttttgcaaatatatcatttttcctaattggttcttgacgtgcagtggactggctctgtgaatgattggcagggtcttagttttgcgagagcatttccttctaagaattattgtgatctgcagaaacagccatttgattcaaaaatcatgtagaaaaggagtaggagaagcaaaacgtttcatttttgggccttaaccatttgaaatgtttggactttaaacataaagccatggagtttataaagccaagtaaccatttgatatggataataatatctactctagagagagtatatatatgcacattgatttttaatgctgttaagatacttttgtaaaactgtaggaacaagagtaattagaccaaattgaagcttaggggacagtaaagtggttgctttccatttagggtaaccatgcatgtggttagtcctctcctcctgagattcagaaccagttgactgtccccttaggtgtataaggagaaaagttgacatgtctgggacctctgacatgtgtacacatgcttgcacacatgcacacacagtgaatgttttaagttatacaaacataagaccttaagatgcaaagagccagaatattctaaagaggtgatgaacagagggggtggaaactgcatcacagatgttttccaagggccagggtggaatctgagctctagtgtctgactttgagatgcattatatttttaacacataaatgaggggatccatatcacattctttcttgtggaccaccaaattgaaggctttcttgtaattcacaagcagcagctctccagcatctctccgtagcctgggtgaagtcccagaagctggtgtgcatcattttccaaggtggcagagctgcttgctctgcagatcattcctttgagagaggagtacaagtgaagaaacaaggaggcacttcctgtaggagcactgatgtgccttgtccacactcccctctgagctttactggtaagagagctccgactgaacatgctgagcagttgagcacttttccatcagcaacaacagcgaggatggaaatggaaaggaaccgaactaaaatgcatttccctttgcagggcagagagctaagctcttaggaatagtgttatagaaataagcaccctaacttcaattcctgaaaatgttggttaatggagagaattttggagtttcannnnnnnnnnnnnnnnnnnnnnnnnnnnnnnnnnnntcttcaggcgctcctagaagagtcccagcccaaggctcgattaaggaccacactgcaggtctgaggctcactgctctgagtcctgaacaccagagccctgcagagagtggtgataacacatcatctctgcaaagaggaacctctcccccggccgccacttcactcaggcttctactgagcagcaaggacagcctgggtttcaaatgccacttcccctgctttagggatccaggtgtcctgatagcgtgaccctgctgaggcaaggtatcaactccgagagtgactgagtcactgagcgtggcacatgaacaaacgtcatgacaaagattctctgagtgaagttaacaccacgtattttacctttgcaaaaaacaaactggcaccctgagttctaactacggacggacgatatctttgcctccacacccagattcctggaaatggctaacgtttcctttctaggggaagggtcgaggaatactcaagtgctagcttagcagctttgttcagtccagatcagagctgttaggtaaaggcctaaccacctccctgcagtctcttatatctcaagctttaggaacccatttctaaatgtacactagcggagaatttatattgtcagccttgattaccataggacaggcagaaaggcgataatttgtatcttttaatataaaagaagcttttaacttttccagcctattataataactgagttatattcactgtggctcaaactaattggcattgtggaacatttctttaccttcaaagttttctccaccaatcatttcagttctattgcagtcctggtgccatatgtcccctgcaaattgtgaaagtaattagtgacaaaatagcagcctgctccttttcaatggcgaaactgtcggcattagcagttttgggtaagctggcggtactataacacgtactggaaacctgttcctcatcaccacctaccagattctggaaatgccgtcttctagaaaacgatggcgtttgtggtggtcttcttttgaaaggaacagtaatttgtgtggatattgttaaagtgtttaaagaatattttgacaattaagtttacattttacaattgctttattttttattaaaatagttgtatataaatattaccctatttcactgttgttcaagtaaatctaaaccttgtagacaagtgagtcatctgatatgtatagaagctgtgatatatagagtacatttattgtgtaaatgtttatgaatataattgttcctgtgtttttataagttggggatattttgttgttttacggcaacaaaatttattgcatttaaatggtttttatgtaatagaaatcacgcaaaatagtgaaggatttaaaatatgtatatgatacatgtaaatgtacaaactttagaaagaaataaatccaacaaatttcaaaaaaaaaaaaaaaaaaaaaaaaaaaagaaaaaaggggggggaaaatacctcagggagggacactgatgtaaagtgaacacccgatgagacaaagagcggccaaagaaggggcaattaaacaaagcaagggactataaaacgtcgggcaggaacacacacacgtagacaggagagaacaacacagggggcaaacagaacacaccaagatgtcgccaggcaaaaaaaccagaatggacaccaggnnnnnnnnnnnnnnnctgaagtgaataaagacgacacgcactgtatcac

SEQ ID NO: 7252 - DNA, 2891 bp, Homo sapiens
  misc_feature (1887)..(1905): n is a, c, g, or t
  misc_feature (2032)..(2046): n is a, c, g, or t
  misc_feature (2052)..(2066): n is a, c, g, or t
tgggactgcatagtggtcatcatgcggcgttgatgcctgttgtgtgccagtgcccatcctaaatggggggtacgggctagtctggagtggtaaaaggctcagaaaaatcctgcgaagaaaaaaacttctgaggtaataaataggattatcccgtatcgaaggcctttttggacaggtggtgtgtggtggccttggtatgtgctttctcgtgttacatcgcgccatcattggtatatggttagtgtgttggttagtaggcctagtatgaggagcgttatggagtggaagtgaaatcacatggctaggcccggaggtcatcatcgggctgctggtggttgtgggcgtcctctccgtaggcatcgtgctgcctgtcaacttctcaggggacctgctggagagcaatgcctacagctttgggagaaccaccattgccaacttgaaatcagggaacaacctgctatggctgcacacctccttcgccttcctgtatctgctgctcaccgtctacagcatgcgtagacacacctccaagatgcgctacaaggaggatgatctggtgaagcggaccctcttcatcaatggaatctccaaatatgcagagtcagaaaagatcaagaagcattttgaggaagcctaccccaactgcacagttctcgaagcccgcccgtgttacaacgtggctcgcctaatgttcctcgatgcagagaggaagaaggccgagcggggaaagctgtacttcacaaacctccagagcaaggagaacgtgcctaccatgatcaaccccaagccctgtggccacctctgctgctgtgtggtgcgaggctgtgagcaggtggaggccattgagtactacacaaagctggagcagaagctgaaggaagactacaagcgggagaaggagaaggtgaatgagaagcctcttggcatggcctttgtcaccttccacaatgagactatcaccgccatcatcctgaaggacttcaacgtgtgtaaatgccagggctgcacctgccgtggggagccacgcccctcatcctgcagcgagtccctgcacatctccaactggaccgtgtcctatgcccctgaccctcagaacatctactgggagcacctctccatccgaggcttcatctggtggctgcgctgcctggtcatcaatgtcgtcctcttcatcctcctcttcttcctcaccactccagccatcatcatcaccaccatggacaagttcaacgtcaccaagcctgtggagtacctcaacaaccccatcatcacccagttcttccccaccctgctgctgtggtgcttctcggccctccttcccaccatcgtctactactcagccttctttgaagcccactggacacgctctggggagaacaggacaaccatgcacaagtgctacactttcctcatcttcatggtgctgctcctaccctcgctgggactgagcagcctggacctcttcttccgctggctctttgataagaaattcttggctgaggcagctattcggtttgagtgtgtgttcctgcccgacaacggcgccttcttcgtgaactacgtcattgcctcagcctttatcggcaacgccatggacctgctgcgcatcccaggcctgctcatgtacatgatccggctctgcctggcgcgctcggccgccgagaggcgcaacgtgaagcggcattcaggcctacgagtaccagtttggcgcagcctacgcctggatgatgtgcgtcttcaccggtggtcatgacctacagtatcacctgcccccatcatcgtgcccttcgggctcatgtacatgctgctgaagcacctggtagacaggtacaatctctactacgcctacctgccggccaagctggacaagaagatccactcgggggnnnnnnnnnnnnnnnnnnnccgcgcccatcctctgcctcttctggctgctcttcttttccaccatgcgcacggattgagcacacggagacagatactgtggaccccagaagcaatggacggccccccactgctgctgctgtccccnnnnnnnnnnnnnnncacgcnnnnnnnnnnnnnnnctcagaggtggacggggatggggatggggctcctgggagctcaggggatgagcccccatcatcctcatcccaagatgaggagttgctgatgccacccgacgccctcacggacacagacttccagtcttgcgaggacagcctcatagagaatgagattcaccagtaaggggagggaggggccctggaggccacatcctgccccaccccacccccactcccacggacactaaaacgctaataatttattagatctaaagccccttcctccccagcccctgctttcattaaggtatttaaacttgggggtttcactgctctccccccatgatggagggagggagccccccaacctcagtgaggagagccccgagccggccccggggcaaagaggggtgcagagggagttcccccagatcagtacccccaacccctccccagctagtagcatgaccaggagagggttaatgagagccaagaggagtacctggtgcacctggtgccggtggctggagacctggggggcaggtggatctggggctgttcccccccctccgttttttccaccccacagttcctcctgggatctggccctccagggaagtggagcctccagcccctaggggatgcatgaggggggagggggtgctgagtgggaggaagagtcaggctcacagctggggtggcctgggggtgggggtgggcaaggctgacactggaaaatgggtttttgcactgtttttttttggtttgtttttttgttcttttttgtttttttcctttaaaataaaaacaaagaaaagctctaaaaaaaaaaaaaaaaaaaaa

SEQ ID NO: 7253 - DNA, 427 bp, Homo sapiens
ttttttttttttttttttttgccttggtgaacatttattttctatggagaaaccaacataagagctgcttttggactccaccctgggcaacaaggtaatgaatgtggagttaggtggtgactaaagaatttggattctttcctccaggttacaatgctcgttaaggggcagcctgtaatgaaacctgcgatatgtgctagaaccaactaaatgattattttaaaagtcacagtctgcatggggcttcataaattcacgccagggagagctgtctaatgggattgccaccttccacccccaacgcagacttcaaagctccttgctaggtctccactcaaaggcttatcccatggcccgagcaaggaaggcctttgtgtgtgaaaacacctgccacccagcttcaggagcactgagcgctttcggcatg

SEQ ID NO: 7254 - DNA, 3948 bp, Homo sapiens
  misc_feature (1879)..(1890): n is a, c, g, or t
gggggacggtgaaggttgcctcccgcccgtccgggctctgatcctccgtctccccgtcccccggcggccggcccatggcctggcggaggcccgaaccatggacctccgcaccgccgtgtacaacgccgcccgtgatggcaagctgcagctgctccagaagctgctcagcggccggagccgggaggaactggacgagctgacgggcgaggtggccggcgggggaacgccgctactcatcgccgcccgctacggccacctggacgtggtggagtacctggtggaccggtgcggcgcgagcgtggaggccggtggctcggtgcacttcgatggcgagaccatcgagggcgcgccgccgctgtgggccgcctccgcagccggccacctggacgtggtgcggagcctgctgcgccgcggggcctcggtgaaccgcaccacgcgcaccaactccacgcctctccgcgccgcctgcttcgacggccacctggaggtggtgcgctacctggtcggcgagcaccaggccgacctggaggtggccaaccggcacggccacacgtgcctcatgatctcgtgctacaagggccaccgtgagatcgcccgctacctgctggagcagggcgcccaggtgaaccggcgcagcgccaagggcaacacggccctgcatgactgcgccgagtccggcagcctggagatcctgcagctgctgctggggtgcaaggcccgcatggaacgtgacggctacggcatgaccccgctgctcgcggccagcgtgacgggccacaccaacatcgtggagtacctcatccaggagcagcccggccaggagcaggtcgcagggggagaggctcagcctgggctgccccaagaagacccctccaccagccaggggtgtgcgcagcctcagggggctccgtgctgcagctcctccccagaggaaccactgaacggggaatcttacgaaagctgctgtcccaccagccgggaagctgccgtggaagccttggaattgctgggagctacgtatgtggataagaaacgagatctgcttggggcccttaaacactggaggcgggccatggagctgcgtcaccaggggggcgagtacctgcccaaaccggagcccccacagctggtcctggcctatgactattccagggaggtcaacaccaccgaggagctggaggcgctgatcaccgacccggatgagatgcgcatgcaggccctgttgatccgggagcgcatcctcggtccctcgcacccggacacttcctattacatccgttacaggggtgccgtgtacgccgactcgggcaatttcgagcgctgcatccgcttgtggaagtacgccctggacatgcaacagagcaacctggagcctctgagccccatgaccgccagcagcttcctctccttcgcggaactcttctcctacgtgcttcaggaccgggccgccaaaggcagcctgggcacccagatcggctttgcagacctcatgggggttctcaccaaaggggtccgggaagtggaacgggccctgcagctgcccagggagcccggagactcagcccagttcaccaaggcgctggccatcatcctccacctgctctacctgctggagaaagtggagtgcacccccagccaggagcacctgaagcaccagaccgtctaccgcctgctcaagtgcgcgcccaggggcaagaacggcttcacccctctgcacatggctgtggacaaggacaccacaaacgtgggccgctatcccgtgggcagattcccctccctgcacgtggtcaaagtgctgctcgactgcggggccgacccggacagcagggattttgacaacaacaccccgctacacatagcagcccagaacaactgcccnnnnnnnnnnnnatgcgctgatcgaagcaggtgcccacatggacgccaccaatgccttcaagaagacggcctacgagctgctggacgagaagctgctggccaggggtaccatgcagcccttcaactacgtgaccctgcagtgccttgcggcccgggccctggataagaacaagatcccttacaagggcttcatcccggaagatctggaggcgttcatcgaactgcactgacctgcccagaacgcctgcaccctcacctctcccctctcctgctgagatgggggaaatccggctgcggcatagcagatgctcgttcttgcctccttcaggcaccaatcaggagaagggttctgcctcccatcccctctacctgcagacagggtcggaggtgttagcgagcctttggtgctagaagcctgcggggtcatgtgctaagaggacagtctttctccgggagcccgctcactcattctgagttaggaaaagacacaagaccttccccacatcctgtctgcctgggttagggaggcctttgccttgttacctagaggcggagggactgaagccattgcgttccttccctgctagaaacacaggaagaagttgaggacggtctgccttccctcgtccctttacctggccagataactccagccgctgaatacagtgttaggactgggggctcctgagatgagagtttgagattcagggaatgagaccacctctcatttcttccagcatgatcgcgccctgctcccgtgccaccgtagtccctggcagacaggcagggctctgcccagggcagcctgccacttgcatagctttcggttggtttggtgttctgtttatttaataagtgggcaggttgcaagcgttgcacagaaattctgagattttactgccttttttttttttttaagaaagttgtttgttggactccataagtgaatttcaagcagtgaggattttgtggtgcctgagatggccgagggcacagggagtgagctgtatgtgtgaggaatttggtgagcgagataaaagtccacggtgtcaacccctaaaacatgggtgaccgtacatttttatacatctccactctacggccttttacaggctttccgattttacaggcctttccaagtttccattctccttagagagagaactgtgcttccaaacagaaatcaggagtgaccacaaagcctgaaaacactttgccacccagcaaagaactggcacaattggtttgggtctgcattgccatagtgcccgagttaaaactgcaggccactctgccttgcaaacctcacgtggcctctgatttcattgtgggtgcatccacaggtggcccgagctgttctttcagctgctccaaggattgagacccaagtcatcatgaaaaaggcccaagtacagtcttaatgcgataaatccactagctaagacgtcgagtgccaagaccagccttcccagccgaggtttggacaaagtctcaggttcccgtgactcagggtaaggtgctggggctgccagaggacctgccccagcaagatttttgtcaagagcgagactccatcagcccaggcagacgggagcaggttcttggccagcgtagacagcagcaaacagcagcagggaagccattctcactgcatcctccctgcagtagccacggccaggcccttaggaggagcagtgaccgggggtgtccagaaatatcctgtccctggatggaaactaggtctcgtttggattttttttttttttttttgccgtgttaggaaattattttttatttgacaagacaggttttaactcagccgaggtgggaaatggtgtccctgtccctcccaaagcacagagcacagaaatgaggccgtttacatggcgagtctccgtgctggtgtttaagtcattaaaaagatactcaaagaaaaaaaaaaaaaaaaaaaaaaaaaaaaacgcacacttggaaagccacagaaaaacgcggggcgcaatagtagaacggactgagcctgggaggacccaaagaaatagcctccgttatacaaacaaccggaacacagac

SEQ ID NO: 7255 - DNA, 2822 bp, Homo sapiens
  misc_feature (2510)..(2527): n is a, c, g, or t
cagtgtggtgtgccatgctatgtgcacagccccttggattactttgttttaaaaagcatcagagttgggggtactttagggaaacctttgcttaccttgttttgccagtgataagagcagtgggttggagggcacttggccagttttctgttcagcttttcagtgaatgtacccctttaaggttcagacttaaacttccttaaaaagtggcgttgttcatagaatcgttggactcattaatgaatcgttcaactccactcactgaagcccagacctccgtgcccaggcccaatctcgtcaggctgccagagaaagttggtgctgctcatactggtctcacagtctaagtaagtgtctgtgatgctcccaagcaaaggaaatgcaagctctggaaattcgttaatgtatttgatgtcttagtgttttagtgactagggagaccattaactagtttatcattaaccacttatcagtgtattgatgttaaagcatttccctgttagctaaaagaggcctgttcatactatagccaactggtttatcatgtgtggttttcctctaaaagccttggagattagcccttccttgccagtgagaacggttgaccgcctcctgctctgcacggtctgcggcagttgccgtttctggttaggtgtgtcaggttggcttattttgggttcaggcctggcgtagacccacaagtggcagacatatcacaagagtccccagactctgcctagaaacagtgtttgccctttggccagtgacgtggttcatcccggcccatgttgagccatgagtggagtttccagcagagggaggaatgtgtgccttgttcaaggagggcacgacccttaggcctttttcaaccagatttagctgaagggcttgacacctttgaattacagcagttgactcagagtgcaagaagtctggccattttggaaagcaaggtttcctttcagccctgtctactgaccaataccccgactcaccttgtgtggcgcacttcagaatcagatatacctagagtatacctgtggtttggttttataattaatcagctcgttacttcagcccatgaaaatggcatccagggctgccaggagattcagagctcaaaacaaggcgagcttgagttctgcactccagatgtgtgccaaaactagtaaaacttaacggacttacaaccttgtcagtttttttaatgaggcagggatactctgtttttcacactaaacatatgaatgcagcactgctgcctcagctcagcttcgtgcctgggttccccactggtctgggaagactgttgtgctccatagagcagtgcacatctgacccagagggtgggtgttcataactgctacttgctctgctctaccatgtttaaagaaatatttggatgttaaattaactcactatggtttttcacctgggaaggaaacaaattacgtactagagggcattgattggttaaaaacttgtgtatcccgggaaggacctgcggtacaggagtcagccatgtctgtgctgtgtggaaccacctgatgacatggttaacgaggaagacgatgtgttgaccggctgccgtttgaggactttggtcacccagactagacaccttctgtgctcatgtttggaaagctgaaagggaaggacagctgtgccctcctgggagctcatgtgtccctggcgctgtgctagctttcctttacagctgtttacagacaaggcaggcctgaggcagatggccactgctcttgtgatgtttgctcagaggaatatgaacattttatttttgaaaagggatgatgtggttttttgccaggtgtttataattaatcctttaatattatggttattaacctcttaaacatgaatgaattcttgattgttttaacacagtacctaagactaatgctttctgtggacaccactgagctctgccctcaactcccaccctctgcgaccggaggactatgcccctagtaactgctgtcggtgtggacgctgtgctggttctgttttctaaaggagcagaaggacaggtctctgagacaggatcgttgtccctacaggaggaacagtggccttgcttcttagacggtcttcactgtgtgttttaaaacaacaacaacaacaacaacaacaacaacataaaactcttttgacctgtaacttaaagatcataaacttcaggcaataatattttctgtgtaagcttttaaaattatttttggggatcatagcttgttttattttgtgctataaaattaacagtattaaatgacttatattcttagaatacatcgagtgtcttttcttaacagattagtgcctttttatttttgtattccgttttacgttactggtcccagcatcaaaacccttgtttccatggcctgtttgtatattgtctcaataaaacttgcatcagccggtggtggcggcagcttacggtgtttcagtgtctcctcagtccgcccccactagcctcctggcagttcatnnnnnnnnnnnnnnnnnntgcttctcagagacccttagtgctgctgctgaccaagagctagaatgaagtcttggcatccgcccattccaacactcgggcacccagaggagagcacctggggtctccctccaaaagagaaatctccctcccagagtgtctgtcttgtaggtattgtatgggagcctattgcttggccttctgagcatgaggcaatagtttccacagggttgcaccaccacagagaacttggatctttttccttctaggcacccatatctgaggcttctagtatatatttcttcaacatgagcta

SEQ ID NO: 7256 - DNA, 1483 bp, Homo sapiens
ggcgagacctttattctagcgggcaagtgagtagcggcacgagggtcgtgatggcggcgccggaggcggaggttctgtcctcagccgcagtccctgatttggagtggtatgagaagtccgaagaaactcacgcctcccagatagaactacttgagacaagctctacgcaggaacctctcaacgcttcggaggccttttgcccaagagactgcatggtaccagtggtgtttcctgggcctgtgagccaggaaggctgctgtcagtttacttgtgaacttctaaagcatatcatgtatcaacgccagcagctccctctgccctatgaacagcttaagcacttttaccgaaaaccttctccccaggcagaggagatgctgaagaagaaacctcgggccaccactgaggtgagcagcaggaaatgccaacaagccctggcagaactggagagtgtcctcagccacctggaggacttctttgcacggacactagtaccgcgagtgctgattctccttgggggcaatgccctaagccccaaggagttctatgaactcgacttgtctctgctggccccctacagcgtggaccagagcctgagcacagcagcttgtttgcgccgtctcttccgagccatattcatggctgatgcctttagcgagcttcaggctcctccactcatgggcaccgtcgtcatggcacagggacaccgcaactgtggagaagattggtttcgacccaagctcaactatcgagtgcccagccggggccataaactgactgtgaccctgtcatgtggcagaccttccatccgaaccacggcttgggaagactacatttggttccaggcaccagtgacatttaaaggcttccgcgagtgaatgagtgcttcttaatcctaaaaacacaatggctgaattatctttctccatgtggcgctgaatcacccatctggtttggagctagagttgcttcctggtgagagaggaagcaactctccttctggttgtctgcctcccctcagatttcctgataggctgatggcatgtggctgtgactgtgactgtaatcattgctgaacaacatctctttgaatcaaaggttgattttcccagagggtgctgggtcaggcatttctattaggagttggaaagcaaaaatgggtccatagacactctatggaggtgtccctttctgctctttgctgtgtcctttcagaatttttaccaggaacataatgtggatgtgacttatgaacttaaatataaaataaatagattcttattataaaaaaaaaaaaaaaaaaaaaacctcgagggaatcctatgttcgggtggccgggagaaaagaaggggaatttgaaatgggcacaatggctccctaagactgggtttccttgcaccccaacctttttcttttgtaaccaaagctggggtaaaaaatcctgaccccggctcctcccctcataaaaggcggagtccctctcatc

SEQ ID NO: 7257 - DNA, 3047 bp, Homo sapiens
  misc_feature (3045)..(3045): n is a, c, g, or t
ggtgcgccgggccgtggtgagtccgggctcccgtggccgcgtgctgggaggagactggagcccggttaggaagaatggagttggcgactcgctaccagagcacttggcaggcgtggttaggaagaatggagttggcgactcgctaccagatccctaaagaagtggctgacatctttaacgcccccagtgatgatgaagagtttgttggcttccgagatgatgttcccatggaaaccctctcgtcagaggagagctgcgatagttttgactcactagagtcagggaaacagcaggatgtgcgctttcattccaaatacttcacagaagagctaagaagaatttttatagaggacactgactcagagactgaggattttgcaggatttacgcagagtgatctgaatggaaagactaacccagaagtaatggtcgtggagtcagatttgagtgatgatggcaaagcatctttggtgagcgaggaagaggaagatgaagaagaagataaggctacccctagaagaagcaggtctagaagaagtagtattggtcttcgagtagcctttcagttccccaccaagaagctggccaacaaaccagataaaaacagttcttccgagcagttgttttctagcgcacgcttacagaatgagaaaaaaacaattcttgaaagaaagaaagactgtagacaggtgatacaaagggaagattctacctctgagtctgaggatgactctcgggatgagagccaggagagttcagatgctttgctgaaaaggaccatgaacatcaaggagaacaaagccatgcttgcccagttattggcggaattgaactcgatgccagatttcttcccagtacgaaccccaacctcagcttctaggaagaagacagtgaggcgggccttctcggagggacagatcacgcggcgtatgaacccaacccggagtgcgcggcctcctgagaagtttgctctagagaacttcactgtctcagccgctaaatttgcggaagagttttacagcttccgaagaaggaagacaattggggggaaatgccgggagtacagacgacgtcaccgtatatcttcttttcggccagtggaggatatcaccgaagaggacttagaaaatgttgccataactgttcgagataaaatctatgataaagttctgggtaacacgtgccatcagtgtcgacaaaagaccatcgacaccaagacagtgtgtcggaaccagggttgctgtggtgtgcgaggacagttctgtggaccatgcctgcggaaccgctatggggaggatgtcagatcggcattgctggacccggattgggtgtgtcccccctgtcgtgggatctgcaattgcagctactgtcggaagcgtgacggccgctgtgccacaggaatcctcattcatctggccaagttttatggttatgacaatgttaaggaatatctggagagcttacaaaaggagctggtagaagacaattaagaggaaaacaaacagaaccagccacctcaccatagagtactccaacaagacatgcataccattggtgcctaagatttttttacagttgtgtttttatacagaaattctttgtagaaattactattttttgttaaagattgtttatatgcttacaaagatttctcaggaagacagcagagcagaggaatctatatagatgtatgcacagacctgtctgtatgctgaactttgttaaaaatatctgccagttattaaaaagcacagtttaaatggggtggggttaaagttcaggtaagtaagttagagagaaaacattgtatgatcagctcctgcacttgatctatctttggcttcccaaacagtaactcactccaggccaagtgtgccttagcacgagtgaccacagtttaatagaccacacacatcgtttaacctgctcttggtcattggaaatttacactgaacaaagtgcaattaactgtagaacagttttatttttattaaaacttgactgaacaaaaggggaccatcaacattgtagacactggaggccttacagagtgctagcctcttccttcaggactcacctggggcctgctgcttttatattttgaaagagtttaagggctaataatttaatttgttgtttgttaaaaattaaaatctccgttctttccggctgcattgcttttgcatgttcacatatgatgtacttttatgatgtactttttttttttttgagatggagtcttgttctgttgcccaggagggagtgcagtggtgcaacctcggctcactgcaacctttgcctcctaggttcaagtgattctcctacctcctgagtaactgggattacagtcgtgtgccaccacgctcagccctgagttagtttctagtatttttttctgactttcactctaaggatagcgttgaaaaaagaatgcacgtgtgagttactaaaaagttagaataatgtgcatgggaacagtgcagcaacatgctagaaaatcctcactgcactccagcagaggctagaggaatgccagtgttaccttacgcttctagaagcagagccactccagccagaacccattttgcagtcttctcttcgctcttcagcctgaaggtccagatgtagctggggcctctcagtttggttctatacacagggcactcgtaggtctgtttggtttcttgtctgtccacgggggtggcttttgcaaaaatgaccggcatagggcatgccagctccttgagacgggcttcaacaatggttcctgcttgggtgtcccagcgggcgcctatggcaaaaacacagcggttgcaattgtgtggcagcttgctactaatgataatgatcaagttgtttgatgcaataaacattcaacattctggttttgtcataaaaaaaaaaaaaaaaaaaaaaaaaaaaaaaaaaaaaaaaaaaaaaaaaggggcgcgatatcagaggcacccactcttagacccaacataaaaacggcacacaaaagtttacactgttgtccaacatatttactctttttatcatattatngt

SEQ ID NO: 7258 - DNA, 397 bp, Homo sapiens
  misc_feature (14)..(14): n is a, c, g, or t
  misc_feature (21)..(21): n is a, c, g, or t
cctacagcattttnaaatatnacaggtaataattgggaaaagtcctgattccagttacgatcagtgtatggaatccacaagaagatccccataagaaacaaggtgcctggatttcctcggttgtgttccgtcttctttcccaatgcccatcaaccgcctcaaagacactggttgtgagtagatacgagtgcttttccaattaaaaaacatatatgtgtgtgtgtgtatatgtatttgtgcatatacatatatacatgcactatatatgtatcctcaaatatatatttaaaaataatatatatatttgagtatgttggtagggcttcaaacacaacttcttgtgcatgtctgaaacattggtaaaaattcctgatctaaatttattttgtagacttaa

SEQ ID NO: 7259 - DNA, 11623 bp, Homo sapiens
  misc_feature (875)..(917): n is a, c, g, or t
  misc_feature (1219)..(1228): n is a, c, g, or t
  misc_feature (4057)..(4078): n is a, c, g, or t
  misc_feature (6177)..(6192): n is a, c, g, or t
  misc_feature (7492)..(7520): n is a, c, g, or t
gcggccgccaggtgctcctggagtgcagtgcctatcgccggggcgtgtgggggccacaccgagcaccagcttctccgacgccgggaagccgctgtcgccgccgctacctctccctgttgccgccgcctcagatctcttcatgccgctgtaagctcggaggccaaggatgcggagtaggcttcccccagcgcttgccgccctgggcgcggccctgctcctgtcttccattgaggcagaagttgacccaccttcagacttgaattttaaaattatagatgaaaatactgttcatatgtcatgggcaaaaccagttgatccaattgtgggttacagaataacggtggaccctacaacggatgggcctactaaagaatttaccctttcagctagtaccactgaaactttattgtcagaacttgtacctgaaacagagtatgtggtgacaataacttcatatgatgaagtagaagaaagtgtaccagttataggacaactaacaattcaaacaggtagttcgacaaagccagtggagaagaaacctggaaaaaccgagatacaaaaatgctctgtcagtgcctggactgatttggttttcctcgtggatggctcttggagtgtgggaagaaataatttcaagtacattttagacttcattgctgctcttgtgtctgcttttgacattggggaagagaagacaagagttggagttgttcaatacagctctgataccaggactgaatttaacttaaatcagtactaccaaagggatgaacttcttgctgcaataaaaaaaattccatataaaggtggcaacacaatgacaggggatgccattgattatttagttaaaaatactttcacggaatctgctgggnnnnnnnnnnnnnnnnnnnnnnnnnnnnnnnnnnnnnnnnnnngaaaatcccaggatgaagtggaaattccagcaagagagcttcgtaatgttggagttgaagttttctccttgggcattaaagctgcagatgccaaagaactcaaacaaattgcctccacaccttcactgaaccatgttttcaatgtggccaactttgatgcaattgtggatattcagaatgagatcatctcccaggtgtgctcaggtgttgatgaacaacttggtgaattggttagtggagaagaagttgttgagcctccttcaaatttgattgccatggaagtctcttcaaaatatgttaannnnnnnnnngtttcatctcctagtccagtgactggctacaaagtcatcctcacaccaatgactgcaggaagccgacagcacgctctgagtgtggggcctcagacaaccacgctcagtgttcgcgacctctcagcagacacagaataccagatcagtgtttccgccatgaagggaatgacatccagtgaacccatttcaataatggagaagactcagccaatgaaagttcaagtggaatgctcacgtggtgtggatataaaagccgatattgtgtttttggttgatggctcctatagcattgggattgcaaactttgttaaagttagagcctttttggaagttcttgtaaaaagttttgaaatttcaccaaatagggtccagattagtcttgtgcaatacagccgggatcctcatactgagttcactttgaaaaaattcaccaaagttgaagatataattgaagcaataaacaccttcccttacagaggaggatctacaaatactggcaaagcaatgacttatgtcagagagaaaatatttgtgcctagcaagggatcaagaagcaatgtgccaaaggtcatgattcttatcacggatgggaaatcatcagatgctttcagagatcctgcgataaaactgaggaattcagatgttgaaatctttgcagttggtgtgaaggatgccgttcgctcagaattggaagctattgcctctcctcctgcagagacccatgtgttcacagtggaagattttgatgcttttcagaggatatcttttgaactcacacagtctatctgccttagaattgagcaagaattggcagctataaagaagaaagcttacgtccctccaaaggatcttagtttttcagaagtgacttcttatggtttcaaaaccaactggtctccagctggagaaaatgttttttcatatcacatcacctacaaggaagcggctggggatgatgaggtcactgtggtggagccagcatcgagcaccagtgttgttctcagcagcctgaagccagagaccttgtatttggtcaatgtgactgcggagtatgaggatggcttcagcattcccttagctggagaggagaccaccgaagaagtaaaaggagcacctcgaaacctaaaggtgacagatgagactacagatagtttcaaaattacttggactcaagctccagggagagttttaagatatcgaattatatatagaccagttgctggtggagagagcagagaagttaccaccccacccaatcagaggaggagaacactggagaacttgattccagacacgaaatatgaagtatctgtaattcctgaatatttctcaggacctggtactccattaactggaaatgcagccactgaagaagttagagggaatccaagagacttaagagtttctgaccctacgacgtctactatgaaattatcttggagtggggcaccaggaaaagtgaaacagtatctcgtcacatataccccagtggcagggggtgaaactcaagaggtcactgtgaggggagatacaaccaatacggtgctgcagggattgaaggaagggacacaatacgccttatctgtgacagcattgtatgcgtctggggctggagacgccctctttggtgaaggaacaacacttgaagaacgtggttctcctcaagatttagttactaaagacatcactgacacatcaattggggcttattggacatctgctccaggaatggttcgcggttacagggtctcatggaaatcactttatgatgatgttgacactggagagaaaaatctgcctgaagatgcaattcatacgatgatagaaaatctgcagccagagaccaaatacagaatttcagtatttgccacttacagcagtggagaaggagaacctttgactggagatgccacaactgaattatctcaagattccaaaaccctgaaagtagatgaagaaacagaaaacacaatgagagttacatggaaaccagcaccagggaaagtcgtcaactaccgtgttgtctatcgccctcatgggagagggaagcaaatggttgctaaggtgccccccacagtcacttcgacagtgttaaagcgacttcagccacagaccacatatgacatcacagttcttcctatttacaagatgggagaaggaaagcttaggcaaggatcaggaacaacagcttctcggtttaagtctcctagaaacctcaaaacatctgacccaaccatgtcaagcttccgagtgacttgggagcctgcccctggggaagtgaagggttataaagtcacattccaccctacgggggatgacagaagactgggggagttagtggttggaccctatgacaacacagttgttttggaggaacttagggctggtaccacctataaagtaaatgtttttggaatgtttgatggaggagaaagctcaccacttgttggacaagaaatgacaaccctttccgacacaactgttatgccaattttatcttctgggatggagtgtctcaccagagctgaggcagacattgtgttgctggtggatggatcatggagcatcggccgggcaaattttagaaccgtgaggagtttcatttctcgtattgtggaagtctttgacattggccccaaaagagtacaaattgctcttgctcagtatagtggggatcccagaacagagtggcagttaaatgcacacagagacaagaagagcttgttgcaagctgtggcaaacttgccgtacaaaggaggcaatactctcacaggcatggctttgaatttcattcgccaacagaacttcaggacccaagctggcatgagnnnnnnnnnnnnnnnnnnnnnngtgctcattactgatggaaaatcacaagacgatgttgaagcaccttcaaagaaactcaaggatgagggagtggagctgtttgctattggtattaaaaatgctgatgaagtcgaattaaagatgattgcaactgatcctgatgatacccatgaatacaatgtggcagattttgagtcactctccaggatagtggatgatctcaccattaatttgtgtaacagtgtcaaaggtccaggtgatttggaagcaccttctaacttagttatttctgagcgaacccatcgttcttttagagtgagctggacaccaccttctgacagtgtggatcgatataaggtggaatactatccagtttctggagggaaacgtcaagaattttatgtgagtcgaatggaaactagcacagtgctgaaagatctgaaacctgaaactgaatatgttgtcaatgtgtattctgtggtagaagatgaatatagtgagcctctgaaggggacagaaaaaaccttgccagtgcctgtagtcagcctgaatatttatgatgttggccctaccaccatgcatgtgcagtggcagcctgtgggaggagctactggctacatcttgtcatacaaacctgttaaggacacagagccaacaagacccaaagaggtgcgtttggggccaacagtgaatgacatgcagctgactgaccttgttcccaacacggagtatgcagtcacagtccaggctgtcctgcacgacctcactagtgaacctgtcactgttcgggaagtcaccttgcctttacccagacctcaggatctgaaactcagagatgtgactcacagcactatgaatgtcttttgggaacctgtgcctggaaaagtgcgtaaatatattgttcgatacaaaacaccagaagaggatgtcaaagaggtagaggtggacagatcagagaccagcacttccctcaaagacctcttctcacagaccttgtacacagtcagcgtttctgcagtacatgacgagggggagtctcctccagtgactgctcaagaaactacccgacccgtgccagccccaacaaacttaaagattactgaagtaacatcagagggtttcagagggacttgggatcatggagcttcagatgtgtctctctacagaataacttggggaccttttggaagctcagataagatggagaccatcttaaatggagatgaaaacactttggtgttcgaaaacctgaaccccaacaccatctatgaagtttccattactgccatctatgctgatgagtcagaaagtgatgacctgattggcagtgagcgcactctgcctatcttaacaacacaagctcccaaaagtgggccacgaaaccttcaagtgtacaatgcaacatctaacagcctgactgttaagtgggatcctgctagtggtcgtgtgcagaaatataggatcacttatcagccttccacaggggaaggcaatgagcaaacgaccacaataggaggacggcagaacagtgtggtcctgcagaaactgaagccagacactccttacactatcaccgtatcctctctgtatcctgatggtgaaggaggtcggatgacgggaagaggcaagaccaaacctctaaacactgtaaggaacctgagagtgtatgacccttctaccagcactttgaatgtccgctgggaccatgcagagggaaatcctcgtcagtacaagctcttctatgcaccagcagcaggtggtccagaggaactggtaccaatccccgggaataccaattatgccattcttaggaatctgcagccagatacctcatacactgtgactgtagttcccgtttatactgaaggtgatgggggacgcacatcagatactggaaggacattgatgagaggactggcaagaaatgtccaagtatacaatcctacacctaacaggctcggtgttcgctgggaccctgctccaggacctgtgctgcaatatcgcgttgtgtattctcctgtggatggcacaagaccctcagaatctatagtagtgccaggaaacacgcgcatggtgcatctggagcggctgattccggacacactctattccgtgaaccnnnnnnnnnnnnnnnnggatggagagggaaatcccagccctgcccagggccgaacgctaccacgcagtggaccaaggaacctgagagtctttggtgaaacaaccaatagcctctcggtagcctgggatcatgctgatgggccagttcagcagtacaggatcatctattctcccactgttggtgatccaattgatgaatataccacagtcccaggcagaagaaacaatgtaatactgcagcccctgcaacctgacactccatataaaattactgttattgctgtttatgaagatggagatggtggccatctaacaggaaatggaagaactgtgggactccttcctcctcagaacatacacatctctgacgaatggtatacaagattcagggtgtcctgggatccttcaccttctccagttcttggatataaaatagtatataagccagtgggttccaatgagcccatggaagcctttgttggagaaatgacatcatataccttacacaatctcaatcccagcaccacctacgatgtgaatgtttatgctcaatatgattctggactcagtgtccccttgacagatcaaggcactacattatatttaaatgtaacagatctgaaaacttaccagattgggtgggatacattctgtgtcaaatggtcacctcaccgggcagccacctcctacaggctaaaactaagccctgcagatggaacaaggggacaagaaattacagtgcgtggatcagaaaccagtcactgcttcactggcctttcaccagacactgattatggtgtcactgtttttgtgcagacaccaaatctcgagggaccaggagtctctgttaaagaacataccactgtgaaaccaacagaagcccctacagagccacccacacctcctccccctcccaccattccaccagcccgggatgtatgcaaaggggccaaggcagatattgtgttcttgactgatgcctcctggagcattggggacgataattttaacaaagttgtaaaattcatcttcaatactgtgggaggctttgatgaaatcagtcctgctgggattcaggtttcatttgtgcaatacagcgatgaggtcaagtctgagttcaagctgaacacgtacaatgacaaggccctagcccttggggccctccagaatattaggtacagaggaggaaacacaagaacaggcaaggccctcacgtttatcaaggagaaagtcttgacttgggagagcggcatgaggaagaatgtccctaaggtgttggttgtggtcacggacggtcggtcccaggatgaggtcaannnnnnnnnnnnnnnnnnnnnnnnnnnnnggttcagtgtctttgtagttggtgtggctgatgtcgactacaatgagcttgccaacattgccagcaaaccaagtgaacggcacgtgttcattgtggacgactttgaatcttttgagaagatcgaagacaatcttattacatttgtttgtgaaactgccacttcaagttgtcctctcatttatttggatggctacacctcaccaggttttaaaatgcttgaagcatacaacctgacagaaaagaattttgcttctgtacaaggagtatctttggagtcagggtctttccccagctactcagcatacaggattcagaagaatgcgtttgtgaatcagcctacagcagacctacacccaaatggactccctccttcatacacgattatattattattcagacttctcccagaaactcccagtgacccttttgcaatttggcaaatcacagacagagactacaaaccacaagttggagtgattgcagatccttctagcaagacgttatcattctttaacaaggatacaagaggcgaggtgcaaactgttacatttgacacagaagaagtaaagacattattttatggaagttttcacaaggttcatattgtagtgacctcaaaaagtgttaagatttacattgactgctatgaaattatagaaaaagacatcaaggaagctggaaatataacaactgatggttatgaaattcttggaaaactccttaaaggggaaaggaaatcagccgcattccaaatccagagttttgacattgtctgcagtccagtgtggaccagtagagacagatgctgtgatattccctctaggagagatgagggaaaatgccctgcttttccaaattcttgcacatgtacacaggacagcgttggacctccaggacctccaggccctgcaggaggacctggtgctaaaggtcccagaggtgaaagaggtatcagtggggcaattgggccccctggtcctcgtggagacataggtcctccaggcccccagggtcctccaggccctcagggacccaatggactctctattccgggagagcaaggtcgccaagggatgaaaggtgatgctggagagccaggacttccaggccgaacaggaaccccaggattacctggcccaccaggaccaatgggacctccaggagacagaggcttcactggaaaagacagtgcaatgggacccaggggcccaccagggcggccgggaagcccaggctccccaggagtcacaggaccaagtgggaagccaggaaaacctggagatcatggcagaccaggtccatctgggttgaaaggagaaaaaggtgataggggagacattgcttcccagaacatgatgcgagcagttgcaagacaagtctgtgaacaattgataagtggtcagatgaacagattcaatcagatgctgaatcagattccaaatgattaccagtccagtcgcaaccagccaggcccgccgggtccaccgggacctcctggtagcgcaggagccagaggagaacctgggcctggggggcggccaggcttcccgggcacaccagggatgcagggaccccctggggaacgaggtttgccaggagagaaaggtgaaaggggtactggatcttcaggacctcgggggctgcctgggcccccaggtccacaaggagaatccagaacaggtccaccagggtccacaggttcaagaggtccccctggcccccctggccgtcctggaaactcaggtatccagggccccccaggtcctcctggatactgtgattcttctcagtgtgccagcatcccatacaacgggcaaagctatccaggttccggctaacacattttctaagtcgccagtgctgcttacagtttgaatacatgaaaatcctgtttctgagatgtttgcgcacgtgcttattaggaaatgagtctgtatggaaatctcaccacagataatggttaacgaaccgggtcgacatcacaaaggagggtggagactctttttactaacttgaatgagacaaaagcagtggtgtcagtttataatcctgatgcatttcagtaataatgtagaaaaacattattttaaaaaagttccaacacacagccatgaggagccatgaggagcctcagttttgaaagaggtgcataataaaactactaaccagaggagtctatgccattttaagaaaaacaattaacctggttaaagagaaatgtcttatgtaaataataaactaattgtggcttgtaaatgatttgtatgtgataatgtagaataaaatcacttaacaattctacaataagcttctgcatcaaagcctgccgcttgctctatgccggaataacaccaaatggaatctcctcatctcttgcttgttagcgatgtgtctgattcagggcatctgtctttttgttacttttttgtccgtgtcctctcatttgggttttgtaactgcaattttcaaaccaaagtttaaaatcaccttttcttcctgttttgctgtagtcactggtgttcctcacccaccagctgtaactcagtttgtgtgaggtacagccacagaagatgtcatgtactgtatattacctggtgatagttgcttttcaccccccgagttcagtttctaggagccaatgaaacttcccctcacctcctcatctttccaagttgttctttgaattgaggagtttgaaggcataaacagttacttggggatttgcgaaaatcctacttagttactgcgtttacagttctttggcccagtctctgacccttcccaagtatttgtgcaatgattgtgtttactgctggatttttgaaggtttttttttttaagaaagtgccatttcattatttgattatcaccaaattatctggaaataattgggacattgtaacttatctatttatagttatgagattaagactggagtgccatcaccgcgggtgatgatttagcttttgctgtgtgtgtgtgtgtgtgtgtgccttccaaatcatgccataattgtaatgttgaatcggacagagccttacgtgcccgagggcggggcctacctgcctgagcgcgagcccttcatcgtgccggtggagcccgagcggacagcggaatacgaggactacggcgcagacgagcctgcagaggagcctcctgagccccaccggcgctggcggcgcgccctgccccacggacccgggcagtgaaccagagatcacgcgccgcgccgcgaggcttgggggaggtgttgaaattctcatttacaggtcagatagagcagtgtacgtcttttctgaggtgtttcttccagcgttgctcatccaggagtaccctttctgattgtagagaaccttgtttctgcaggaagcctagctccaagcacgcagtctgtagacatttttgcctttgcccttgaaatgcttgcaaaatactttgttaacaaaagctgcaaagagagaacatgccgtgtgcctttagttagcacagcgggcagcctcagtgaaactcttaggttaagcagttaagtcctggaacccagagctgctgtgtatttcgagcgggcagtttatcttttgctatacttattttcaattcaattacaccacgattcaaataattcccctcctaaaaccaaaaaggagggaaacgtcaactccattgcaattacttatcttcctcttctatctctgttatacgccggggcatagaatgctcgtatacatctctttaacaaccacaaaccttaagccatgtagatgaagttagtgcatcaacgggatacagttccatattgccttaaacctccttgttttagacacactaacatttataccaaattgcagattattctgcagagagggaattgcatgtttgtgttgtatatttagtatgaacttttttcagaatataatatttcttagttatcaaaagtagttggaaaacatttgcaagactatgaacatagaattgctgcttttatattttaactgcagattgtgaatttcactgccttatattatttatttctgaaacaaaagaggcatttttcaataaaactactgaaaatttgaaaaaaaaaaaaaaaaaaaaaaaaaaaaaaa

SEQ ID NO: 7260 - DNA, 2104 bp, Homo sapiens
  misc_feature (926)..(940): n is a, c, g, or t
cagtgtagctggagcagagctccccggaattccacaggcaactgagaacggagagggatgcaggccagccagggatccagcgtcttccccatcgtcactctccatggcctccgtctgcacacagtgttcgtctgcacagcttgtcagcgcgttatcatgacttctatttggcaccggcccgtctgtccactgtcctggcttgttccaagcgctgccttctccaactggggtcctggctgcagagctgtctgctccccacgttgggcaactccagccaagattcctacacccaaatgtgaccgtgttgctcacgaagaaggctcagctttgcgtgtgcccagccgtgtgcacagctcgtcccaactcctgcgggtggcacctgcctctcccacctccagtctttcccctgtgatgagcagatgaccaccgccctccagggtcagcgtttggctgtttgtgtgcctgcccacccgcctccctgtgcctgggcctgccctgtgcctgcacacaggaggggctcatggcgtttgccctacacggatgggctgtcctgggagctactggacagtcaccttggtgggaatgccagaggcatgggcattaggtccccccggccagcctccgttgccacatgggctatttttgtccatcgcgtgggacaacctagtattgggggaaaactcagtccactctaaagaagcatcggcgttttggatggacgaatgctgcttcatgcgactccatgtcaatggactattttattcaactcgggtatttatgagtgtctcctctgtgccagccacgtgtgaaagaagaactccaagttactggacaccaggacaaaccaggtagatcactgcatccggttcctcctctttctgccgactctcccgggcaaccgttctgattcctggcatggagttggnnnnnnnnnnnnnnntacccagagcgcctggtgtgcagccaaaggcccccattttattagtcggtgtgttcagtatcacgctcaagacaagggccaacctattacttcacacacctcaaatacaaaaagtgcctgggaacgtcgatgaggtattaaaggaaaccactggtcttgtcagtcatgtacacacagaaaaaaaaaccagtcatttttatttttattttttgagacagagtttcgctcttgttgcccaggctggagtgcaatggtgcaatttcagctcactgcaatctctgccacccagattcaagcaattctcctgtttcagcctcccgagtagctggaattgcagacacccatcaccacgcccagctaattttatgtatttttagtagagatggggtttcaccatgttggtcaggctggtcttgaactcctgacctcaggtgatccacccacgtcaggctcccaaagtgctgagattacaggcatgaaccactgtgcccagccgaaaacaaccaagaattttttaacaataaaatgaccagcaagtaaacttgaaacaaaaatggacaaatatttaaaatatttttaaatgtatgtattttaattggcaaataatacttgtatatattgtttacaacttgttttaaagtatgaatacattgtgaaaaaaaaaaaaaaaaaaaaaaaaaaaaaaaaaaaaaaaaaaaaaaaaaaaaaaaaaaaaaaaaaaaaaaaaaaaaaaaaaggggcgcgcgcccccaattcccccccggggggcgccccttgccccccccctttttttaagggggcgccccccaaatgggaggcgggttcataataaaaagcacagcagcagacgagcgcgccgggttaaaacaacgggcgcgggtggagtggggagaataccacgagctgttcatcggggtgaacttgtgatgtgggagagagacacccccattctggcggcggggggggcgacactaattgtgggaacgacaacacaccagcgagaaattataaaccctccgcggggagaatataataaaaccttgcgcaggagagttgcagtggctggctgacccaccaccgacaatgagtccgcggccagagaaaagctgggccacagacgaagatagtttaggaacacatatgtccaccggagcaggtagagaa

SEQ ID NO: 7261 - DNA, 2322 bp, Homo sapiens
  misc_feature (95)..(119): n is a, c, g, or t
ggatgtcgcataagtgcgtgtatgtgcgggacaggccccgagaagctagtgactcctgcacacccccattgcacaaatgaaatcacagcccaggnnnnnnnnnnnnnnnnnnnnnnnnnagaaatagagctctctccccgcccctccccctaaccacaagggattgtcctgacaacttgtggggatagaagggctcacagggcaggggtctcagctgcccccatccttagggcaggggagttagtgtggagccgagagcaggtcccagctccccctgccagccgcactgtcccaggcccagggacctctgccgggtcctcccagcccttgccacacagcctagacgtagtagcctgggcttccagcaggtggcgagctggttcgtgctggaaatttctcctgggtttcttggggtcaaacatgccaacctccaagaccccatcctcacgtctcccacttttctggcgctggagtgtgcagggcgtaggacctgcatgtgtgggtgtgagaatgggggcggtggacaccagggggcgagtgtgtgactaggtgtgtgtgcacatgtgtagggtgcagacgcatgggtgccatcctttgcgttcagtgactgtgcgtccagacccctcaccagcggcccccccaccacaccctggtcctcccaggcagctgtcccagggcgcccaggcctgccttgcaccacagccctcaggaaatccggcaaggaggcccctgcaggttggttcaggcccccaggtagcaaaacagagacaacagcagccccgcctgaccccctgcccctctctgtggaggcccgggacccccgcaataagcaccacatgggtgaggctgtccctgtcagggtcccctgccagggtccctcctggggttctgggccatttgaggggctctttgatgggccaggccggccagagtgaactccgagcactttctggctggtgccccaacctctccactccccactcattcccaccttgaaaaagggctataggtcccctgccctgcccgggtccagtttacaaacagtgtggggtggccccagggcctggccccactctccctgctgtgcccactcctctccagactccacctccccagtgggtatgggccctccacatgccaggtaagtagcaaacccccactccctccaaggaccaggtctcagagaaggccctggtcactgcccccggcccacctggagcccatcggggctgcctctcccagccgcgacttctccttttgccttaggcctcgcgacatcctgatctctcctgcaataactaggaatcgagattccacagtagacgtcccttgccgtgctcgctctctctctctcgcgcgctctctctctctctctctctctctctctctctctctctctctctctctctctctctctctcctctctttctctctctccctctctctgttaagatcctgttcgggagtttccccagccgttgtagtatctagtatgttagagttgggaggggaccatagttatgtagcccagccccctcattcccagaggcacccagagggccagcctccagcctgaccccagagcagaaccggaacaccaggttggggccctggtgctgccacctcctctgctggtcgggctgggaccctttgccccttaggagaggtgttggtcacagatgtttacctcagtttatgtcactgtcgaagaaacaaaaaataatagcaaaaaataacactgtagacatgaagacttagaagacaaaaaaaaaaaaatcacacaaaaaatctcccttgttgcgattcttctgtgaaggtacagtgtgtatgtgtgtatgtgtgtatgtgtgtgcgtgtctctgtcccagaccctgtgtcccccacactgccccctgtccttcggtgcttcccagagacccctctgagctggcctgtggggcacgggaagccccctggatgggaggcggggccacaggtcggctagagggtctccaccaggcccactgaacagaaccccacggctgccagaatgttccctgagcccacactgtggccagtgggacagtcctggtggctgacatcagcgtccatgcttggctcagggcctggggcggggtcctgggtagagtcctagccccagagccccagcccctcatgtcttgccgcccttcctccatgtgtttgtaaatactctggcatcctttggccctgagaaggtttttaaatgtgttatttacttctctaaacatgacgattgctataaaaataaacaaaagtttagaaaaatgaaaaaaaaaaaaaaaaaaaaagaaaggaaaaaaa

SEQ ID NO: 7262 - DNA, 2677 bp, Homo sapiens
  misc_feature (406)..(429): n is a, c, g, or t
  misc_feature (2446)..(2446): n is a, c, g, or t
  misc_feature (2448)..(2449): n is a, c, g, or t
  misc_feature (2451)..(2454): n is a, c, g, or t
  misc_feature (2456)..(2464): n is a, c, g, or t
  misc_feature (2469)..(2469): n is a, c, g, or t
  misc_feature (2473)..(2475): n is a, c, g, or t
  misc_feature (2478)..(2479): n is a, c, g, or t
  misc_feature (2483)..(2485): n is a, c, g, or t
  misc_feature (2491)..(2492): n is a, c, g, or t
  misc_feature (2494)..(2494): n is a, c, g, or t
  misc_feature (2497)..(2497): n is a, c, g, or t
  misc_feature (2507)..(2508): n is a, c, g, or t
  misc_feature (2510)..(2510): n is a, c, g, or t
  misc_feature (2522)..(2522): n is a, c, g, or t
  misc_feature (2576)..(2576): n is a, c, g, or t
  misc_feature (2609)..(2609): n is a, c, g, or t
  misc_feature (2612)..(2612): n is a, c, g, or t
  misc_feature (2614)..(2616): n is a, c, g, or t
  misc_feature (2647)..(2647): n is a, c, g, or t
  misc_feature (2660)..(2660): n is a, c, g, or t
cgtccacggcagagccaaggggtcctggaggccgtgggggagactcggaaaccagagggtgggcggtgccagggtgcacacagcaaaccggggctgagccaggcctgggacaccgagcccagcctctcccctgcggtgtgactgtgggtcccagggtggacgtgccggggcccccagccagtgcaggagaggcctttgagcagcttacctgagaagggcccatggggagctgggacctccggcctccgtcgcaagggcctgcgctgctctgagggcccgtcggcagctgggtcagggccacggggagctgggacccccggcctccgtcgcacgtgcctgcgctgctctgagggcccgtcggcagctgggtgcccagggtcccgaaggctcagggtggccctgaggnnnnnnnnnnnnnnnnnnnnnnnnatttttcatatgaggaacccagcacgtcccgcctgcctccggcccctggaggctttctcagtgacaaaccgtttctgtttctgtcttgttttctcagacaaacgagggagcaggagacaccccctgactttttttatttctctgactacgagaggcacaatgcggagattgctgccttccacctggacaggatcctggacttccgccgggtccctcccgtggccggcaggatggtcaacatgaccaaggagatccgggacgtcacacgggacaagaagctctggaggaccttcttcatctctccagccaacaacatctgcttctacggcgagtgttcctactactgctccacggagcacgccctgtgcgggaagccagaccagatcgagggctcgctggcggccttcctgcccgacctgtccctggccaagaggaagacctggcggaacccatggcggcgttcctaccacaagcgcaagaaggccgagtgggaggtggaccctgactactgcgaggaggtgaagcagacaccgccctacgacagcagccaccgcatcctggacgtcatggacatgacgatcttcgacttcctcatgggaaacatggaccgtcaccactacgagacttttgagaagtttgggaatgaaacgttcatcatccacttagacaatggaagagggtttgggaagtattcgcacgacgagctctccatcctggtgccgctacagcagtgctgcaggatccggaagtccacctacctgcgtctgcagctcctggccaaggaggagtacaagctgagcctgctgatggccgagtctctgcggggggaccaggtggcacccgtgctgtaccagccgcacctggaggccctggaccggcggctccgcgtcgttctaaaggccgtccgggactgcgtggagagggacgggctccacagcgtggtggatgacgacctggacactgagcacagagccgcctcggcgaggtagtgtccgccggccgctgcgctgcccgggacagagacagaggggccggacctcccagcaagcgcatgcgcccgtcgtgaattcagtgaattcagaggcaggacgggatcatccggagtcgggagctgctgccacaggaggcgaggctccccaggtctcataggacacattttgtcagtgtttgaccagaaaagcttgggaaggaagcgctgtctgtgctcacggacagaggcggccggcgccggaggcattccatcctttctgtagggaaaggagcctttatttactattttgtatttatatttgatgaataagtatataaacagagacgtgtacacagatgccaatcacctaccaaaccaaacacgaggaccgccctccctggttctgggggcccctcaaggccaagctcacccctcaagtgctctcacactcgggacctaattcaagtaaaaaccctttctccttcctggggcctcggctcctggagggctggagggtctcgtctgaggacgggaggaggctctcgctggacgtctggcctgtgcgctggtggacggatgcctacgcggttttggaggacccgatgaccaggcgtcctgcgagtccgcccgctggcctgcagcacccacctcggacttggctgtggacggttggtgcaagtgcatcctgcagggctggctgtgcgcagctgtgggctgacctttgcagagttttgtggaatagtttgcaatgtcataaaagtgcaataaaggtacagcagatgtgaaaaaaaaaaaaaaaaagctcaaggcatctatgtccggtgccgcacaaagagcgaaagaaatgggaccaggcgcatagctgcgcccctgccccacctatcctggcacaaagcggaacacctgccccgccgccccaaagaggaggtcccaccaaatctcccacagcgccgggatacaccctcgcgttatacgaaatagcgtacaagaactccccgggaaagaaaggccgcccacaccaaccggcggcaccgtgtatggccaccncnncnnnnannnnnnnnncccgngggnnnggnntggnnngggggnngnggngcgcggcggnngngggggcaagtgngggggggggggcgtgggggggggggggggggccggccgcgccgcgccccccgcngggggccgaccagggcggggcggcgcacccggncgncnnncgccgcccgccccgccccgcgcgcgccgcgncacccgcacccgngaaaggaaccaccggcg

SEQ ID NO: 7263 - DNA, 466 bp, Homo sapiens
  misc_feature (435)..(452): n is a, c, g, or t
tttttttttttttttttaaagttacagtcgtcaacccgatgttaaggttttactgtaccttgagcaacatgcaacagcagaaagcactcatataaacttcaacttcatgattgattctttgtatcttaattttgtaaatttagaatttcagatattaaagaatgaggtagtggagggagattttcttgtgttgtttccatggtgaccaacttgcaggcattaactgctggcttcagcctaccttaagtgcttgcttctccttctctgtgtaggagctctcttgggtttcataggagcttttctggctgagttcgagagcccagactcatctgtgctagtgggaaacctttctgcttctgttccctttgagagacctcactttattcaagtctcacattcggctcccctctttgcagagccccaaatccatgtccnnnnnnnnnnnnnnnnnnttagaactcccccc

SEQ ID NO: 7264 - DNA, 2100 bp, Homo sapiens
ttttttttttttttttttccaaaagaggcgaaaccgtttatcaagtcggcgccggggcggtatctacagtatctacagtatctacatgtatctacaccgcctgcaggcggggctctcgggctgtctacactgcaactgccggccgggccgcgggcgacgcggtctcggggagaacaataaatatcacttccttccgcctccgaccgggcgctttggcactggcgggcggggacccccttggccctcggggccggggaaggacccgcggtggctccagggactggggaaccggatacttcgatagcccaaggggctgggggtggcgagggggcccccatggcttcgaggctggggaaggggagagccgcggtggcccctggggctgggggaacgtattccttgcttgcccttggggcagggtggccgggcccggcgaacttcggggctgtgcaggaccggggcgggagcgcgacagggcccgtgttatctggggcaatagtcgtaggagccgggcggcgcggctccggccgacgagtacatgttggcggccgcggcagctgcggcagcggcggcggcggccgcggcggctggactcacggggtggtggtggtggtgcggatgcgcgtgcgggtggtagccgtggccacgcaggccgggcagcgggtagggcgccggccggctcttggccccgagatagtggtcgtaggcggcggccggatatttgtaggggtggtggtgcagcggctccgatgcgccgggcgcctccaggcgcagctcggggttcgggggactgggccggcctccgggcgcgccgggcagcgggactaagccgccggcgccgccggccccgggcagcgaggggcttagcacccgggccagcagctgcggaggatgcgccgggtccccgagcactgctggcccgcccgcgtcgcgctggaattctcgccgggcctcagccgcgtctttctccgtgccgctgggctgcgtcggggaagccacggggttccgcgagcgcgcgaaggcgctcatgagcggcagtgcgccgggccggtggttccggggccagtcctcagggtcacagtcccggaagcctttcgcgaagggattgctggcaatcttgagctgcgtgatccgatggttctggtaggcagtgaccgcggtgaatcgtgtctcctcgaacacaaaggttttgaagttctcctcggcatatttctcgctatctttgcgtgggtccacatagaccacgtggaagcggggctggtatctgtgcatggaattcagaataatgtggccgttgtcgtccagtaggttgttggtcagcttgagcttgtcgaaggacacgatttgcttcatccactgcgcgcccttggcaggcgagtccgggtggtagtgcacgcggcctggcgtggcagggtcggccttccccgccaccagccaggaggagctgtggaaggcgtaccggtagcgcttatcgtccaccggcacgaagtccatgagcagcatatagtcggccatgggatccatgccgaagagcttcacttggaaggtgggaaacatccgcctgccggccttggtgacgatcatctcggtgcccagctggttgaactcgtcccacagcgccttcatctctagctgcacgctcacaccggccaccttcgcgttcttcttcaccggcgccttggctgcggccgcgcagctggccccggggccctcgggctcggcggcggcgctggtggcggccccggcggccggcgcaaacgggtaggcgtgcggcggcggcggcgggcccggggcgccgggggcggcggcggcgcacgggtcgtagcgcggcggcggcggcgggggctcgcgcgggccgtacgggtcggcgccgggcgacgcggcgcccgggaagccccccgcggcccccaggctgctcaggctgctggccgtgaaggcttccatgtccctggtgacggtgctgaagtgcatccctgccggggatcctggcagccagcgaagcttcacccggtcggaggaccctgagccctggtgggcggtgcgctccgccgcctccgctggcccggccgcggttcccttcctcctcgctccccctgccgg

SEQ ID NO: 7265 - DNA, 2286 bp, Homo sapiens
tttctttttgtttgctgccttccgtagaagatgtggcttgctcatgcttgacttctgccatggttgtgaggcctccccagccatgtggaactgttttcaggtgctggttccatggctcttcctgagccgaaaataaggaaactccatagaccttgtccactggaacttgttcccatctaccctccactctatccagggtgatggatctctgcagtaagtggaagagttcttcatggcccccaaggttatatccatctagaacttcagcacgtaatttcatctggaaatagtgcctttgcggatataagttaggtaaaactgaagatgagatcatactggattaggatgggatctaaatccaatgaaaatgtcttcataaaaaacaggaaagaacccatagaaacacaaggaagaaggtcatgtgaagatggaggcagagattggagggatgcagccaccggcccaggaatgccagcagccacccagaagctggaaggaaatgagggattctctcctagaacctttagagagaacatggtcctgtgaacagcttgattttggacttgcccatagcttgtatactcttactttggatacaattttatccaaacttggctaaacagtttctcagcctatggaaaatttaaaatggagaagattcaactcgattcttacagattcaaagcaagaaaataatgggaacataggaggagaccaagaaagcctataaaaagcaaaaatatgaagtgaacattgtggtagctttaagatgtttagtgtagctgcaggcaccctatacacatgaaaacccccaaggggaatccccatatcacagtgtagtgtgatatttgacattcgtgatcatctagagatgtacagaaaaggtgaatctgtgttctgtatattctgcctaaggcaaagaaatgtttagctctctttaaaatagttccataattttttctaaaaagctttgcttgaaaactgtaagcttcccatatctggagcatttcactttaaatatttggataaatatgttatcttcttacttggacatttcatgtgtttagggattgtcttctaaattcttcctaattcatatagctgctaacacttcccgcagagctaaaccattacagatatgaaataaagacctattgatttgacttacttttacttgtaaaaccttctgagtgttataacctcatttaatctttcagcatttacagtttcaagagtttgtgtcacaattagaagaattcagctgcacctccaagtgacagcagttgctctggttggtgggtgatctcaggaggcttgagaattgctttgtctgtgagggaagtaagacattttcagagccccactttagaaggtgtgaactggctagataatgaaccccagggctaacgctgctatagcagtgggaaggaggtgatgggttttcagtttggacctcaaacatcaataccctcctggtacggggaggaacagagtccctcctttacttctccattagaaagaatgagatggcaagacaatgaaacaggcaaagtgaacagagatgcaagacaaaattcaggtgagagagccagagcatcactcagccattcctgacatgtaaaacaggcaactagaaatttgcagaaaggaagcgaagtctccataaagatgtttttaaagtgagcttgaagtatttggagacaattcagtgttacataaaatctgcaaatctctggataaagaagcagagatcccagcatgggacaaatggagcctcaaaagtgggaagaagacagagaagaccagggcagaatgcatctcttcctttctcttggctttcctggataaggactgcatcattcctgtggaaggacaggccatcagctccgaaacactgtatgtattttccagtatatactgctagctgtgtgatgttgggaaaatttgttaccctgtctaacccccacttccctcatctgtaaaatggaaataatgatagtacctacctatctcataggtggcaactacaaggggcagcacactcagggaattaaggaagtttcagtgaacatcaactttatgaacacagtgttcataaaggcaggtcagtgcagtggtttgggagccaggagaagcacgtgggccggagtgtgcctgcaggagacaaggtcagagatgttgctaataatggagaataaaggatgcattctcattactgaaaaaaaaaaaaaaaaaaaaaaaaaaaaaaaaaaaaagtcgacgcggccacgaatttagtagtagtag

SEQ ID NO: 7266 - DNA, 2783 bp, Homo sapiens
ggcacgagttcagagctaagtctccgggctcctttcacatctgcaggagcagccagcctgggaccgcgcggcgcggggcgcgctctcgcctctcctgcaccctcagccggcgcgcttctcttatgggcgtctgctgcagtctggctgcggtcgaactgaaagcggcggcgggagaccaaacttagaccccgctgtggactagagaactcagagaaggcagagggagagggagagagagagagagaagggacccgaggaggaggcttccatcacgtcattgcaggatgttctggaagctttccctgtccttgttcctggtggcggtgctggtgaaggtggcggaagcccggaagaaccggccggcgggcgccatcccctcgccttacaaggacggcagcagcaacaactcggagagatggcagcaccagatcaaggaggtgctggcctccagccaggaggccctggtggtcaccgagcgcaagtacctcaagagtgactggtgcaagacgcagccgctgcggcagacggtgagcgaggagggctgccggagccgcaccatcctcaaccgcttctgctacggccagtgcaactccttctacatcccgcggcacgtgaagaaggaggaggagtccttccagtcctgcgccttctgcaagccccagcgcgtcacctccgtcctcgtggagctcgagtgccccggcctggacccacccttccgactcaagaaaatccagaaggtgaagcagtgccggtgcatgtccgtgaacctgagcgactcggacaagcagtgagcgccgggccggacgcagctcagccccgcgcgcgcccggccgctgggtggcgccgccgccgcctctgtccctgccctccgagcccactgtcacgctgcctggtgttccccctcagcagcaagcacttctcttagggctgacggtgtccttgtcacagacgtggatcgcaagtggagcttttgctgatgtgttcctgaccgaccccgggtcccacctgtgccccctaaaccaggcggtggatcaggcccgaaggaaaatgctggaaaaccaccaccgccacccagcagtcagagaggacctttcgaggtgatgcactgtaaatccggcattgatgtttccaccatgtggaaaagcaaggatttccctggccccgccctgcactccagctcgcccctttcccgcgcgaagtgaaggatgcgtcacttttctgagcggcccctcagacctctcctgctggtccctggacctctggctgggagcgctcattcttgtgactggcaggctgccctcggtcgctgctgtgatgaggatatgtgcaacctccataaatatgtcggtggacggggcgtctcctaataaacctgataccaagaagacaacttgagccacttggatcccgaagtgggcttcccgggaaacctcgagcagagcaggctacacaatcccccatcctcaagtccccaccgcctcttcttcctcactgtccccgccccctatttgtggactaaagatgaactctggtgtgcatgctattattgctgcaattagaatattatcacacacaaaggtctctatattaacgctggttttataagtgaccgtatattgtaaagagctgttaaaaagtattatagacctattcatgtattatttcacatgttttgactctggcttgcagcaccattcggagtaaggatgacagcaggcccagaaggtgttttactcagaaaaaaaaatgcctggtcagcaattcactgtcatgcacctatttttagattgggcagggagatgggaggagtcgtgatttttactttgaatactatttcactgacgttactaagcattgcagcacaatgtagaaattggcttgggatggataggtatagggaagggcattcgttgggaaattgatgaccggaaactagaaagcccctataatgtggaatatgcatatgtggggtgaaaccgtatactactttcactgccatgacactaggcaaaaaatatttcctgttaaaaaaaaaaaaaaaaaaaagggatattgaaaaatataaggagttgagtcgctttgtggtatagaagggagtaaggaataaaagatatagaatagtaatctagttgaactgttctgcacaaaacatgcttccttttcaaagaatagacttcaaaagggacgaacaaacattaggtcaccttttgtgtttataatgaattgttgacgtttccatgctgtggtctcttgatatacggaagtagacgtaacttattttccagcgaaattatatacttcttctgggctcctttgctcagttgccccaggaaggcttccctgtgagtaatgcttatggaatctgaaaaatgtgaatgagctgccattggtgggaaatcagtaaactttgaaaaccttttcacctgatgattcccttggtaagtgctccctgtgagggggccaccttcccctagtaatgtgagagagaccctcctgcaaaccgcttggggggacttaaccttcctgaatactacggtagggatgggtggatcctagaagattttcacttgaaaaaccaaggatttgggggtggggcgcggggttttctaccccacccctgcaactgccatccgcggacactccaccagcatgacccctaaattttttggacgcgtcacgcctcccgctccgcatattccatctgtttcgacacgctcagaacacgcgtttcctaactttgcctcacctcaatattttccccctgctcgtatcgcatccccagt

SEQ ID NO: 7267 - DNA, 2084 bp, Homo sapiens
ggtcttgtctctatttatgttgtggtgtgtgattctttgtatgtgatccattgttctgcgttgcatgggtctatagcttgctggtctctccatgttggcattcctacataggcgaggatatggtagagatgttcgcactgtagtccttctggcctatgtcgcccatcacaacctagtggcattttgtcagcatgtcacgttgctaagaccccttttcttagagtctttattggaagtgcgtggcttctgtccttgttgcctcttttaccttttgttggtattgctgctagcaaaaaaagtcctttctgcagggagcccctaagtgcttattattctcctgtatctgcctgcccctcagatctagtgttggaagggcagcgggtaagggttcccaagccagccccaacacccttcccacttggcacccagagggggctgtgggtggaggcctgactccaggcctctcctgcccacaccctctgggctgagttccttctttcccttggacgcccagtgctggccttggaggacggtcagctggaggatggcggtgggggaggctgtctttgtaccactgcagcatcccccacttctccacggaagccccatcccaaagctgctgcctggccccttgctgtaaagtgtgaagggggcggctgagttctcttaggacccagagccagggccctcaacttccatcctgcgggaggccttggccgggcactgccagtgtcttccagagccacacccagggaccacgggaggatcctgacccctgcagggctcaggggtcagcagggacccactgccccatctccctctccccaccaagacagccccagaaggagcagccagctgggatgggaacccaaggctgtccacatctggcttttgtgggactcagaaagggaagcagaactgagggctgggatattcctcatggtggcagcgctcatagcgaaagcctactgtaatatgcacccatctcatccacgtagtaaagtgaacttaaaaattcaatcaaatgaacaattaaataaacacctgtgtgtttaagaaaaaaaaaaaaaaaaaacaaacaaccaaaaaaaaataacaaaaaaaaaacaaaacaacaaacaacacaacatcccaaccccacacaccacccaccaaccaaaaaacacacccaacatcccccacccaacaacaaccaccacaaccacctcaccactaaatctatagctcctcgcccgacgctactgatagtatatcacacatcattactccctaatcactccattttcaagactataaaacatctataatcatgtgacatacatctaatgacaacacatatattatttaaaaaaaacaatatcaacgctacgacatcacaccaatatagtcgcattctgtaaacaatcaccaaccaccatcatgccgcgcaggccgacggctgcgtggcggagcccacgaagccacgcgggactgggagcgcgtgagggtgagggcgtcgagggtatgacagggagtgtgcccgacgctgcagccgcaaagataacacagagggacggtgagacggggatcagcaccgccacgtaaagcagaggctcaggggtcgaggcggttacgagggacgcgggaggaagtggggctctcgcacgcttatcaccaaacagaataaccaatcaaccatgatcactaatccacacactcacccgccactgtatcgcaaatctccgtacaaccaagcacataaacagaacgataagcccacccatcacactgcgccgacacaaaacaacatacaagactctaccatagacctatgcaccctgctacccagcctaggcgtcacacccccacgacccagcatagaatatcaacaccaccagactctcccactacacagcgaggagaggaacacgtgaagatacgtcatcattgattccaacttcactcgtttccgctgacctacccaaccccaacacacaccacacacacaccaacataacacacaacaccaccacaatcagcctctttctgtcgtgatgtgttgttgttgtcatctatctcacatacaccacccacaacacacaacc

SEQ ID NO: 7268 - DNA, 2213 bp, Homo sapiens
cattttatggatggaccttgttcatactccggaaaattgactcaggtaccttacccagtaaactggcagaacttactgatctctatacctctggctgaaatgtagcaagcactcagaaaatgtttaagtagattaatgtattacatttcttaccagagtgactaagacccactaaaatttattgctagaacttcggcttaattactatgccttccgcttttggggtggcattgtcacatttagtagtctcagttgaaggtaaaaatttaatcaggtttagttgttttagtagtgtggcataatttttatatggtgaaattaaaatggtggaatctttaataactatcacccagtcaattctgtcctcaaatcatcctacacacgttttcttccccaactcttattttacaaaattccaaatctatagaaaagttgaaaaactagtacaattaacatccttatactcttcacttttattcaccagttgttggcattttgccacatttactgaaccatttgaaagttgtaggtattatgatattcctttttgtgctgaagtatttggtgtgggtgatgatgtgtatttattgtatcacatcaggtggcaataaagtcaggttttattactggttttgctaaatttgaacatgcttaaggtgtagtcttctagctctcctcattgtaaaggaacattttccctttttaattaatctgtgtagtgatatttacagaccatgtgattattatcttttgttgttgttgttgttgttgttgttgttgttgttgttgttggagtcttgctctgtcaccaggctcgagtgcagtggcgcgatctcagcttactgcaacctctgcctcctgggttcaggcgattgccctgcctcagcctcctgagtggctgggattacaggcgcgtgccaccatgcccagcaattttttgtgtgttactagagatggggtttcaccatgttggccggtatgtcttgatctcctgacctcgtgatccacccacctcggcctaccaaggtgctgggattacaggtgtgagccaccgctcctggccaatattatcttcttaacttttcgtctagtgatttccctttcccactttttaatatttctgtggatttcatgttttttaaattaatctaacacatggcattaatggaaaataacccattatgttttaattaatgagttctaatcagtttctgccactgtctttttttcatgctcaaattgtcccaagcttatcagtggttccctttcaagctacttcctatgtccttttgatataatgtcattggtgtttgaagactcccttgctttatgcacaccaagatttccagggtcatcttgttatcttgcctgccccagacctgtaatcagccatctctctgagaagttctggttcttttaagtggggaatagcatttagaaaccaaatatgggtgttggacatgcccacttttaacggagcatcgttatttttaggacttttctaaggatagtgttaggaaatcatattttttcaaaatcacgaatttagtctcatagctccaattcaagtccaccactacaaggttcttcatcacttctcacattctatatatgcatctcccctctctcacagtgaaaacccaggttctcagcaatacttgcttattcactttatccaacaatacgtacaaaatagtttcagcataacaatactaatactgctaccaacagcaaactacttagtacaactgtttttttttttttttttttttttggacattgtttttgcacttagactatagtccattaagggtatctagttagagttatatatatagttagatacatttgtttctgttgatattcagtgttaggatgtgattttttatattcttattctgaaattctaaaaaaggtttgcatgattcaaaacttaaaaaaatgtggccaggcatagtggctcatgcctgtaatcccagcactttgggaggccaaggtgggcggatctcgaggtcaggagatcgagaccatcctggctaacacagtgaaaccccatctgtactaaaaatacagaaaattagccaggtgcctgtagtcccagctactcgggaggctgaggcaggagagtggtgtgaacccaggaggcggagcttgcagtgagccgagatcacaccactgcaccccagtctgggcgacagagcgagagtcgtctc

SEQ ID NO: 7269 - DNA, 5581 bp, Homo sapiens
  misc_feature (1042)..(1068): n is a, c, g, or t
  misc_feature (1203)..(1239): n is a, c, g, or t
aagttttggagcgccggacaagctgaggtccgcgactcgtcgctaagattccccaaaactgagatttcaagaaaattcaccctttccgctttctttggcgcccttcaaccgtgaaggaaatgaaggttgagaacctggaacccgcttccaaagaccaagccctttctctgtgcctcacaacagtcttgcgctgtagctgtttttattacccctattttactactggggaggagatttgaggtcctgaaagtgaagtgacttgctggacgtcacttagcagaggagatggcgaaacctggattagaggcgatgccttctaactcccagcgtggacttgcctcctttcctgggggtgactgaatgcccagccagggacgcgacgtctctggccagcagaaatacggcctcctccccgccgactgggcaaagggggaccttgcggccaaggagggattcgcaggcgggccgggggtgggagcgggggccggagccggagccttggcccgcccccgggcggcgctgtgattggccggccgctccggcgggcgtcgcgattggccgtcctgcagccgttgagatttgaactcggtatttgtggctttgcccgcgcgttgccagactcagaggcggccctttgcctctgcctgccggggattggccggattctccgccgacttgaaaactgccttgctaattggtgcgtgttgtgcacgcgtgttttttccttttcatttcagcctgactgccggaatcagagccgcgggtgagatccccagccctgtgagcctgtaggagtagaatggctccccaaatgtatgagttccatctgccattatccccagaggagttgttgaaaagtggaggggtgaatcagtatgttgtgcaagaggtactgtccatcaaacatcttccaccacagcttagagcttttcaggctgcctttcgagctcaggggcccctggctatgctgcagcactttgatactatctacagcattttgcatcactttcgaagtatagatcctggcctcaaagaagatacnnnnnnnnnnnnnnnnnnnnnnnnnnncccgccactcccaggagcttccagctatcctggatgatacaactttgagtggatcagatagaaacgcccatctaaatgccctcaaaatgaactgttatgctctgatacgtctcctggaatcctttgagaccatgnnnnnnnnnnnnnnnnnnnnnnnnnnnnnnnnnnnnnggaagggtaagaaagctcggaccaaggcagcccatggctttgactgggaagaagagaggcaaccaattcttcagcttttaacacagctacttcagttggacatccgtcacctgtggaaccactcaataattgaagaagaatttgtcagtttggttactggctgttgctaccgccttctggagaatcccaccattaatcaccagaagaaccgccccactcgggaagccataacacacctgcttggtgtagccttgacccgttataaccatatgctcagtgctacagtgaagatcatccagatgctgcagcactttgaacacctggcacctgtactggttgcagccgtgagtctatgggcaactgactatggaatgaagagcatagtgggagagattgtaagagagattggacaaaagtgtccccaagagctgagtcgagacccttcagggacaaagggctttgcagcattcctgacagaactagcagaacgtgtcccagctatcctgatgtccagcatgtgcattttgctagatcacctggatggagaaaattacatgatgcgtaatgctgtgctggcagccatggcggagatggtgctgcaggttctcagtggcgatcaactggaagcagcagcccgagacaccagagaccagttcttggatactttacaagcccatggccatgatgtcaactcctttgtgcggagccgtgttttgcagctcttcacccgaattgtccagcagaaggctctccccctgacacgtttccaggcagtggtggctttagctgtgggacgtctggcagacaagtcagtgctagtatgtaaaaatgccatccagctgctggccagttttctagccaataatcctttctcctgcaagcttagtgatgctgaccttgccggaccactgcagaaggagacccagaaattacaagagatgagggcccagaggcgaactgcagcagcttctgcagtgctggacccagaggaggagtgggaagccatgctgccagagttgaagtctaccctgcagcagcttctacagcttccccagggagaggaggagattcctgagcaaattgccaatacagagacaactgaagatgtgaaaggacgcatctatcaactgcttgccaaagctagttacaaaaaggccatcattctcactcgagaagccacaggccacttccaggagtccgaacccttcagtcatatagacccagaggagtcagaggagaccaggctcttgaatatcttaggacttatcttcaaaggcccagcagcttccacacaagaaaagaatccccgggagtctacaggaaacatggtcacaggacagactgtctgtaaaaataaacccaatatgtcggatcctgaggaatccaggggaaatgatgaactagtgaagcaggagatgctggtacagtatctgcaggatgcctacagcttctcccggaagattacagaggccattggcataatcagcaagatgatgtatgaaaacacaactacagtggtgcaggaggtgattgaattctttgtgatggtcttccaatttggggtaccccaggccctgtttggggtgcgccgtatgctgcctctcatctggtctaaggagcctggtgtccgggaagccgtgcttaatgcctaccgccaactctacctcaaccccaaaggggactctgccagagccaaggcccaggctttgattcagaatctctctctgctgctagtggatgcctcggttgggaccattcagtgtcttgaggaaattctctgtgagtttgtgcagaaggatgagttgaaaccagcagtgacccagctgctgtgggagcgggccaccgagagaaggtccgcctgctcctctggagcgctgttcctctgtcatgcttcttggcatgatggcacgaggaaagccagaaattgtgggaagcaatttagacacactggtgagcatagggctggatgagaagtttccacaggactacaggctggcccagcaggtgtgccatgccattgccaacatctcggacaggagaaagccttctctgggcaaacgtcacccccccttccggctgcctcaggaacacaggttgtttgagcgactgcgggagacagtcacaaaaggctttgtccacccagacccactctggatcccattcaaagaggtggcagtgaccctcatttaccaactggcagagggccccgaagtgatctgtgcccagatattgcagggctgtgcaaaacaggccctggagaagctagaagagaagagaaccagtcaggaggacccgaaggagtcccccgcaatgctccccactttcctgttgatgaacctgctgtccctggctggggatgtggctctgcagcagctggtccacttggagcaggcagtgagtggagagctctgccggcgccgagttctccgggaagaacaggagcacaagaccaaagatcccaaggagaagaatacgagctctgagaccaccatggaggaggagctggggctggttggggcaacagcagatgacacagaggcagaactaatccgtggcatctgcgagatggaactgttggatggcaaacagacactggctgcctttgttccactcttgcttaaagtctgtaacaacccaggcctctatagcaacccagacctctctgcagctgcttcacttgcccttggcaagttctgcatgatcagtgccactttctgcgactcccagcttcgtcttctgttcaccatgctggaaaagtctccacttcccattgtccggtctaacctcatggttgccactggggatctggccatccgctttcccaatctggtggacccctggactcctcatctgtatgctcgcctccgggaccctgctcagcaagtgcggaaaacagcggggctggtgatgacccacctgatcctcaaggacatggtgaaggtgaaggggcaggtcagcgagatggcggtgctgctcatcgaccccgagcctcagattgctgccctggccaagaacttcttcaatgagctctcccacaagggcaacgcaatctataatctccttccagatatcatcagccgcctgtcagaccccgagctgggggtggaggaagagcctttccacaccatcatgaaacagctcctctcctacatcaccaaggacaagcagacagagagcctggtggaaaagctgtgtcagcggttccgcacatcccgaactgagcggcagcagcgagacctggcctactgtgtgtcacagctgcccctcacagagcgaggcctccgtaagatgcttgacaattttgactgttttggagacaaactgtcagatgagtccatcttcagtgcttttttgtcagttgtgggcaagctgcgacgtggggccaagcctgagggcaaggctataatagatgaatttgagcagaagcttcgggcctgtcataccagaggtttggatggaatcaaggagcttgagattggccaagcaggtagccagagagcgccatcagccaagaaaccatccactggttctaggtaccagcctctggcttctacagcctcagacaatgactttgtcacaccagagccccgccgtactacccgtcggcatccaaacacccagcagcgagcttccaaaaagaaacccaaagttgtcttctcaagtgatgagtccagtgaggaagatctttcagcagagatgacagaagacgagacacccaagaaaacaactcccattctcagagcatcggctcgcaggcacagatcctaggaagtctgttcctgtcctccctgtgcagggtatcctgtagggtgacctggaattcgaattctgtttcccttgtaaaatatttgtctgtctctttttttataaaaaaaaaaaaggccgggcactgtggctcacgcctgtaatcccagcactttgcgataccaaggcgggtggataacctgaggtagggagttcgagaccagcctgaccaacatggagaaaccccatctctactaaaaataaaaaattagccgggcgtattggcgtgcgcctgtaatcccagctactcaagaggctgaggcaggagaatcgcctgaacccagaggcggaggttgtagtgagccgaaatcacaccattgcactccagcttgggcaacaatagcgaacctccatctcaaattaaaaaaaaaatgcctacacgctctttaaaatgcaaggctttctcttaaattagcctaactgaactgcgttgagctgcttcaactttggaatatatgtttgccaatctccttgttttctaatgaataaatgtttttatatacttttagacatattacaaaaaaaaaaaaaaaaaaaa

SEQ ID NO: 7270 - DNA, 642 bp, Homo sapiens
  misc_feature (221)..(221): n is a, c, g, or t
cttagtttcaagggcagcctaggcaaaatatggggcccctttctcccccaaaaataaaaatttttattattattaaataaattaaaggaaagagccacccatgaagatacttagctgaggccaggtacagtggctcatgcctataatcccaaagtgctgggattacaggtgtgaaccactgcgcccagccccaagtggctttttcaattacatgagccaancatattctcacaagtccattcgagtttggtgtctgttacttgcaaataagggagttctgattggttcccagtgaaacctcatctgtaagacctctgagccaccagtatccacggggcttgtcctataacagctcctgtgcaatccagtaaccttgaacactggaagccactgagcccttctgtgagtagatgcacacctctgaggctaagattactggtgtactcattgggaccagtttggtctcagtgactgaaaactcaacccaaacttgttcatttggaaaggaaaagtcaaccaggcacagtggctcatgcctgtagttccagcactttgggaggctgaggtggacagatcgcttgagcccaggggttcaagaccaacctgggcaacatagcaaaaccctgcctctaccaaaaaaaa

SEQ ID NO: 7271 - DNA, 2201 bp, Homo sapiens
ctgggctggtggggacaggcgcagggcttggggctgggtctccggacagaggcctggcttttctagtcatgggcaggtcctagcccctgcccccataaaagaggagacatagggggctatggtgagataccctgaaacctcccccctctgaccccgcagccaggccccaggctggccgggagtggcccctcacactggttctccccactttctctgcctgtggcatcgaaggccccgggcaccatggcccaggccctgggggaggacctggtgcagcctcccgagctgcaggatgactccagctccttggggtccgactcagagctcagcgggcctggcccatatcgccaggccgaccgctatggattcattgggggcagctcagcagagccagggccgggccacccacctgcagacctcatccgccaacgggagatgaagtgggtggagatgacctcgcactgggagaaaaccatgtcccggcggtacaagaaggtaaagatgcagtgccggaaaggcatcccgtctgccctgcgcgcccgatgctggcccctgttgtgtggggcccatgtgtgccagaagaacagccctggcacctatcaggagctggcagaggcccctggagacccacagtggatggagaccattggcagggacctgcaccgtcaattccctctgcacgagatgtttgtgtcgcctcagggccacgggcagcaggggctcctgcaggtgctcaaggcctacaccctgtatcgaccggagcagggctactgccaggcccaggggcccgtggctgctgtgctgctcatgcacctgcccccagaggaggccttctggtgcctggtgcagatctgtgaggtctacctccctgggtactacgggccccacatggaggctgtgcggctggacgccgaggtgttcatggccctgctgcggcggctgcttccgcacgtgcacaagcacctgcagcaggtgggcgtcggacccctgctgtacctgcccgagtggttcctgtgcctcttcgcccgctccctgcccttccccacagtgctgcgtgtctgggatgccttcctcagtgagggtgccagagtactgttccgtgtggggctgacactggtgcgcctggcgctgggcactgcagagcagcgaggggcctgccctggcctcctggagacactgggagcccttcgagccatcccccccgcgcagctgcaggaggaggccttcatgtcacaggtgcacagcgtggtgctgtcagagcgggacctgcagcgggagatcaaggcccagctggcccagctgcccgattccgcgccgggacccccgccccggccacaggtccgcctcgccggggcccaagccatctttgaggcccagcagctggcaggagtgcgacgaggagccaagcctgaggtgcctcggattgtggtgcagcccccggaggagcccagaccaccgcggcggaaaccccagacccgcggcaagactttccatgggctcctgactcgggcccggggcccccccatcgaggggccccccaggccccaacgaggctccacctccttcctggacacccgcttctgagaggaccatggacttagtgtcccccagtctcaattgcctgatggctgatgccagcccggcaaataggcaccgcactttactcttgggactcggggacttggcttccttcctggcaaggaccaggcagtggggaaggaggaggtcctccgtggtacatactgggtcaggcactagcatggaggagggtcacagagtggggcacgtgaggacccatggaaccgtcctggtgcccaggccctcacaagtaccaaagccagcaccaaaggagtcagggaaggggttggctgagtcaagggaccccagagggcaccaggaataaaatcttcttgaacagaaaaaaaaaaaaaaaaaaacaaaaaaaaaaagaagaaaagaccggggacctatataggggggcgagaagcgtgataatgagacaggaacatagttcttagagcattttgttaacaggttgagaaggggggaccacaggggagggtatatgacaggatgcggaagaaagagagagcgaggacgttgtgagtggtgttagagggagggtatcccaacgggagacagagagagagataatattcttatatatacagggtgaataagacgtagaacgatgggtgaag

SEQ ID NO: 7272 - DNA, 508 bp, Homo sapiens
ttttttttttttggtttgctgagttcaaagctgcggggtgggggagtcttccctggcattcagcagccctggggttgcatttctctttaaagggctatttaggaaaacacaaggaacggattttaaaaagaagacagaaagaaatccagctcccagcttgcagcagcactgagaggttgtacattctaaaggacctggtcatttacagcaaagcctatggagggataattcccatttcagccgcatccaccttaacaaatgtggatcccactgctggcttcttagaactgtacagcaaagcctgtggggggataattcccatttcagccgcatccaccttaaacgtggatcccactgctggcgtcttagaactggagcggtgtctgctaaccagcctgctggaccctctgtctataggtaccgggtggtgacctgcaaatccagccttggagaatgaccgtccgaatctgcagcctgacacctcgccacctcggctttgaaaatggca

SEQ ID NO: 7273 - DNA, 2221 bp, Homo sapiens
  misc_feature (309)..(327): n is a, c, g, or t
gcccacttttcccaaacaaagctcccggcaactttctccctcgcagcgccccgcccgcccgcggctccccagccccaggccgggaggcccagatgggggaaccccgggctggggccgccctggacgatggcagcggctggacgggcagtgaggaaggcagtgaggagggtaccggcggcagtgagggggctgggggtgacgggggcccggatgcagagggggtgtggagcccagacattgagcagagcttccaggaggccctggccatctatccaccctgcggccgccggaaaataattttgtctgatnnnnnnnnnnnnnnnnnnnggaatgaactgatcgcccgctacatcaagctgagaacggggaagacccgaactcgaaaacaggtttctagtcacatccaggttttggcccgaaggaaatcaagggaaatccagtccaagttgaaggaccaggtttccaaggacaaggctttccagacaatggcaaccatgtcctctgcccagctcatctccgcgccttctctgcaggccaaactgggtcccactggtcctcaggcctctgagcttttccagttttggtctggaggatctgggcccccctggaatgttccagatgtgaagccattctcacagacaccgttcaccttgtcactgactcccccatctactgacctcccagggtacgagcccccccaagccctctcacccctgcccccacctaccccatcgcccccagcctggcaggctcggggcctgggcaccgcccggttgcagctggtagagttctcagccttcgtggaaccgccagatgcagttgattcttaccagaggcacctgttcgtgcacatcagccagcactgccccagccccggagcgccgccgctcgagagtgtggacgtccggcagatctacgacaaattccctgagaaaaagggtggcctccgagagctatatgatcgtggccccccccatgccttcttcctggtcaagttctgggcggacctgaactggggcccaagtggtgaggaggcaggggccggtggcagcatcagcagtggtggcttctacggagtgagcagccagtatgagagcctggaacacatgaccctcacctgttcctccaaggtctgctcttttggcaagcaggtggtggagaaggtggagacggaacgggcccagctggaggacggcagatttgtgtaccgcctgctgcgctcgcccatgtgcgagtacctggtgaatttcttgcacaagttgcggcagctgcctgagcgatacatgatgaacagcgtcctggaaaacttcaccatcctccaggtggtgacaaacagagacacccaggaactgctgctctgcaccgcctatgtcttcgaggtctccaccagcgagcgtgggccccagcatcacagttaccgcctggtcagggactgaagggggaccccaaaactggctcaccccccagaacaccctcctcccagggagggtcctccagctcacctcatgcttcttatttggggagagggctgtgatgtaaaggggttgacctcagaggcctaagcaactggggccatcccccccattagaggggcccccaaaacttggttggagagctgaacaggctgggactgaggaaaggataaaccccgatattgggacctcacagtgggtgtctgaaaggacagatcactccggagtatcagggattgtggggacaggagtgagacaaccccccaggtacagcactggcttttcttttcagcccctgacaggccacccccactcctctgcatgtcttggagagcgctagttacacattggcttgtcccctttactttttcccagccacccctccccctgaaatttctgcccctctctaccaccctcactccatgacctgtgagatcacaaagtgaagatgaaccctttctgtgcaggagcagagccaggtgggccctggacattttttttttttttaatataacgagatatttataagtgggtgctagggtcttgactttatctccgctgcacaagcagtgtgttgaactttctaatctcatccctctcctaagtgagccctgagctagacggtttccttcctcccctctcaaagtttgtttgtttgtgttctgacagaggataaagctattttaccaaaaaaaaaaaaaaaaaaaaaaaaaaaaaaaaaaaaaaaaaaaaaaaaaaaaaaaaaaaaa

SEQ ID NO: 7274 - DNA, 2379 bp, Homo sapiens
ggcacgagggccgtgcccgcggagagagcgcggcgcgggaggccggcggccggccggctgcatggcgcgctgcgagaggctgcgcggagcggccctgcgcgacgtgctgggccgggcgcagggggtcctgttcgactgtgacggggtgctgtggaacggcgagcgcgccgtgccgggcgccccggagctgctggagcggctggcgcgggccggcaaggcggctctgtttgtgagcaacaacagccggcgcgcgcggcccgagctggccctgcgcttcgcgcgcctcggcttcggggggctgcgcgccgagcagctcttcagctccgcgctgtgcgccgcgcgcctgctgcgccagcgcctgcccgggcctccggacgcgccgggcgccgtgttcgtgctgggcggcgaggggctgcgcgccgagctgcgcgccgcggggctgcgcctggccggggacccgagcgcgggggacggcgcggccccgcgcgtgcgcgccgtgcttgtgggctacgacgagcacttctccttcgccaagctgagggaggcgtgcgcgcacctgcgcgaccccgagtgcctactcgtggccaccgaccgtgacccatggcacccgctgagcgacggcagccggacccctggcaccgggagcctggccgctgcagtggagacagcctcgggacgccaggccctggtggtgggcaagcccagcccctacatgttcgagtgcatcacggagaacttcagcatcgaccccgcacgcacgcttatggtgggtgaccgcctggagaccgacatcctctttggccaccgctgcggcatgaccactgtgctcacgctcacaggagtctcccgcctagaagaggcccaggcctacctagcggccggccagcacgacctcgtgccccattactatgtggagagcatcgcagacttgacagaggggttggaggactgagcccactgcacctgcagccacaggcccacccctccccactccctgatcccgtaggtggaggcgatgggtcacgagccatgttaagcacaaccggctccttggtccagttctgcaccggggtggggctgggacccggggaaggtttgagggcccttgcaaccccctcccagcagtggctgggcactctttgctgccccagaagctggtcccctatggattcatcttggcctgacccagccaggtggccttatttcttccctgtcacctcccctccttgaaatctgggccctggtgcctgctgaagattccctctatccctgagtacttagtcttctcccccttccctggggcttctagagctctctctgcccctcaggtcctggcccttgggtccttgtcaaccagaggtctagggaaccacaacccttattgtcctgggtggaccaatccaaaggctaagtgatagtgactcatcaatgttgggtcctgtggggtaccagtttaggttcctaagtaatagtgaccctttcacgtcctggagcccgagtggaccaatcggaagcctaagtgacgatgaccctcgcatgtcctaggtccctgggtggacccatcaggaccccaagtgatagtgacccagtggtcttttagatcctcagtagaacagtccagaagcctgagagacagtggccccttgataatctgggtctcacgggaccagctaggggtccaggtttcagtcagtaaataagagtggtccacgtcctaaagacacctctcctttacaaagacttgtgatgctctggggcttctgtggccaagccccaccctttcctggtcatggtacccgtacagcgttgatggccacagctcgaaggggggctttcgtgtccccctgtgcggtcagtgttttcagtaccacctctctcccgtgcccacttggctatttacttatttatttattgtgtgccagtgatggtgggtgggggctgggccttccccgccacctccacccctgttgtgacctgtccttccgtacttaataaagtgcgcgtgggagtgttaaaaaaaaaaaaaaaaaaaaaaaaaaaaaaaaaaaaaaaaaccacacacccccaaccgcacagcaccaccacacaaaagggaggccggcgacacaaacaagcacaagccaggaggcgccaccacgaacaacgcagacacaacacaccggagcgacgcagagaacacaacagggcgcccccaacaaacacgacggccaagccacctacgcaaaagaggagagacaccggagaccggaggtagacagacacacgccggggcgcagggaacaaaaacacagcagcacacggccgactctttccgtgcagacgcacgaaccgccaaagctccgggaaggcacgacgaccaaaagaggcggacaaacggac

SEQ ID NO: 7275 - DNA, 3316 bp, Homo sapiens
  misc_feature (1954)..(1979): n is a, c, g, or t
agcttgaacatttggtgattacttttccctccccggatctagtccttttaaggagtaagtctaaagaatgaggccatgaagtcactatttcctcccacctcagttggtctcctggtacttagctggcctatcgctttgtgtggcaatacccctgggtcgcttccccactcagcctcctgtatctgctgttcacaggacatgccattatgtctttccagtacggatcacagtgctgccatatcacagaccctgccagccggcacagaaccatgcctcgtcacagctctgcccaactcacaggctgccaagatgaggccacaggtccacctagggcggcagatgctggtgctatttgtcacgacttttgccaaaacatgtacactgttgctcacatctttcgtaagaatggttgacactaaggggccatggaaaagcacttttaaaaaattatgtggtggaatcaaactcacagaggcagaaatgttagtgccgtgctctaaccaagtaagcttagtgttccccacagtgatctgtatctggcctgagtctcctcaagcagcaacccccactgtccagcatgtggaaggtagatccttatgacaacaccagacccatagttaccaggaaagaaaaaggaagctgagtgttgtgaaggggaagaaatcctttttataagaagtaatcatttttaggccgggtgcagtggctcatgcctgtaatcccagcactttgggaggctgagacaggtggatcacttgaggtcaggagtttgagacctgcctggccaacatgatgaaaccctgtctctactaaaaatgcaaaaaaaattagccaggcatggtggcatgtgcctgtagtcccaactactcaggaggctgaggcaggagaatcacttgaacctgggaggcagaggttgcaatgagctgagatcgcaacactgcactccagcctgggcgacagagcaagactccatctcaaaaacaaaaacaaaaaaaaaacctttttaaagtaaattgagtgtaaaatgttttcaccatgaagccattgcaccctctcccccaggaaacagtgcctaaggatgatgtcaagttacagccagtttgctctgatcccccaggacctaagaaaactgtgagtgcttcagcatgcaaaggtagagctaccagataaggagaataacttggccatttatagcaaactgcctgactttggagtgagaaaccaagcaccttctaggtcctaggataggtgaattggaggtgcagctgctgaagttcccattttctacatacttcaggagccagggtgtttcatttggttttgtaaaactttgctgtaagtcatcacagttaattcttcgaatggacattttagagtgtaactttttttcaaaattagcagaacagatatctctgctcattctctttatacatttagttttttaaagttcccctagtatacctgttaggcactctaaataggacacagttaaagctaaaagaaggaccagttgctccctagagcctacagttcagaactatcttgttgtcatgtcctggtttggtttggtttgtttttaactcaacaagttggaaaccatgagtttaaagcaaactatttccttttcttaagcttaaagagaatttttttttaatctttagctcctcatttaggtagtgaaggcttccctgaaagacagcagtgcccttctctggaagaagaggctgggaccaaaagcctgagtctatgggttgaggattttgagcattcctttgacaagcttctatgtatttttaatataagactcataaatgaacctgatgtggtgttcatgacccatcccttaagcatgcttgctttttttactttactttttgagtatagtacttgtcttgtttttcctggagccatgctaggatttaattcctatgtgccactacccgcccatgtcctnnnnnnnnnnnnnnnnnnnnnnnnnnctcatgtcttgaggagaagcaatgtgaaaagcatcaggaaagctgaaccttacgttcaagtcagcaaacatttgtgagcattctagtatgcttgcgaccttgacactttttaaaaattatctttttatttgcttcgagtatcaaccgtatagttgactctagtggggcgaagggagcagagatgagagcaaaattcagacttgctgcccctgtgtgtctcagttctcatgtctctctgagaaatgtgttggcccaattccctatctgccactctgagtctcttgagtaaatgtgtgtaaatgagaaaaattatctcaaagatttaacttattatttagatattttcttctttttaaactcaggaataaacctggtttgtagataatataatatggctactagagctataattgagtaggtgactagaagcattttttcaaatatatttcttgtaaagacatctactttgttttaactaggaaaagaaactcctcatattaaaataaacatttccataagcactttctagaagagtgtagcatccatctaccatccatcccagaatgtttgtatcttgctcatagtatttcaaaaatttttatgggtgaaaaaaatgcacttttttatttattggaaaagtgtagagttattgaattaaattctcaagtgggacaatttagtgtaaagggaaacatgggttttggagacaagagcacagggctgtggtccctgttccagcattgactttactatgtgacctcgagcaaatgatttaacttctctgtgcctcagtttctccatatacaaaatggggataatgatactaaccattgcctacctcatagagatgttatggggacaaacgaaataatagagataagcacgaatgctttcaactcttcggaagaaaggtgctatataaattgaagttgtgtttttaatgatccaattattaattatgtttagggtttaaataacaatactgttagtcatgttaagaataagttttgttttgatgcatatttccacttctcttctgtggccagatcttgatcattcaaccagtaatggtacctgaggaactgaaatgggtatttgttttctgtatgtttctgccagtagtatttcaattgaatatccagaaaagactggagtttaacttgtaatatcttatagtttacatgtaataaaacttattcaagctatatataaaagtatgattacatgtaaatagcaggtatgttgtaattaaaggcacttatcaaattgtctttgttcttttttaattgtaataaaagtcagttttacataaaaaaaaaaaaaaaaaaaaaaaacgt

SEQ ID NO: 7276 - DNA, 1201 bp, Homo sapiens
gaggcgcgggggatgacgccacggacatggtggccgagaccggcggggtgggggacgtgtcgcgcggcgcggtggcctcggtcggtaccctgggcgcggagcagctgcctcattagtattcgtacccacgaggcggcgcagcgggccctcggggacagcgagcgtcgcggccatggcttatcactcgggctacggagcccacggctccaagcacagggcccgggcagccccggatccccctcccctcttcgatgacacaagcggtggttattccagccagcccgggggatacccagccacaggagcagacgtggccttcagtgtcaaccacttgcttggggacccaatggccaatgtggctatggcctatggcagctccatcgcatcccatgggaaggacatggtgcacaaggagctgcaccgttttgtgtctgtgagcaaactcaagtatttttttgctgtggacacagcctacgtggccaagaagctagggctgctggtcttcccctacacacaccagaactgggaagtgcagtacagtcgtgatgctcctctgcccccccggcaagacctcaacgcccctgacctctatatccccacgatggccttcattacttacgtgctcctggctgggatggcactgggcattcagaaaaggttctccccggaggtgctgggcctgtgtgcaagcacagcgctggtgtgggtggtgatggaggtgctggccctgctcctgggcctctacctggccaccgtgcgcagtgacctgagcacctttcacctgctggcctacagtggctacaaatacgtgggaatgatcctcagtgtgctcacggggctgctgttcggcagcgatggctactacgtggcgctggcctggacctcatcggcgctcatgtacttcattgtgcgctctttgcggacagcagccctgggccccgacagcatggggggccccgtcccccggcagcgtctccagctctacctgactctgggagctgcagccttccagcccctcatcatatactggctgactttccacctggtccggtgaccccctggccccagatggcactgagtttttcattcattgaagatttgatttccttgaaaaaaaaaaaaaaaaaaaaaaaaaaaaaaaaaaaaaaaaaaaaaaaaaaaaaaaaaaaaaaaaaaaaaaaaaaaaaaaaaaaaaaggggg

SEQ ID NO: 7277 - DNA, 1330 bp, Homo sapiens
  misc_feature (2)..(2): n is a, c, g, or t
tnagtcttcaggatatcacaccacgtcttttcaaaaactaaagagaattcaaaaagggctgatggtaggctttgaacatggggttggctgtttcccagtaaaactggaattcctgtcgttactgtttccttatcaaagaaggggcaagctcttttgccttttaggccagacatagcaaacgctttataattggcatagacataaaggataaaaggaaaataaccgtctgccgatggtccgtacttcttaaaaaacataggtaatagaaaatatacacaagtcagaatgtgaaattaaataatggtttgaacagaaaattcaaacaagactctttccaatttaaagggccaaaccctaccaaagagagggagttgactggcttttaaaaagtatttaaataccacaaatgacatttaatttcactgtattcagctttaagttgttcacaatgaaaccacactttcaaacaagcaggttcaagctgctgaatagacattatttcttgcattaaaataccactaatgcattctcttgcaacactgccagacatgggattgtcaccatagaattagttggtactatgccatctttcactctttcacaagtcagtgatggaacctgctttatgaccaagattcatcctcaaataagccacatgtacccttctgacaaagctgtgtaaagtattagaatctgatgctctagaaagatcctagttgcctttgtgtatatttactgcctgcttgagtgtttctatgtgtgggttttccctgtatcttgtagaaatgttggggtgttttcctctgccatatggctcgtggcctgcgagccaactatttcagctgtattttaccttcatttttgatgaggtgatttaaattttgtttcactttgtgtagtgaattccacagtagttttctgattgttgttaaaaatgacttaacatattacacagatattcaataaaaatgttttatttcctgttgaaaaaaaaaaaaaaaaaccgcgcccgggctaggcccgaggggcccgccgaatcatctccgccacctcctcccccgatgccccgcgcagtctcccgcccccgtcgccgtggcgcccccccagcgcggcccgtttattcctcactcccgcgtccaccatcggcgcccccctacctaccaccagtcctccccccccccaccaagcgccggtgtcgaaccgcgggcacgtctgcgtcgagcgcggcgacgctgcgcgcgtgccgcccggggcgcgcgtaccgccaccctcctctcccccggcagtcaaagccctacgaggtgtcgcgacccgggggtgcggacccggc

SEQ ID NO: 7278 - DNA, 1111 bp, Homo sapiens
cggctgttacgaagggtcgtctgtcgcttgggtgtttcgcactgatggtgggtggtgagtaatgcatccaggaagcctggaggcctgtggtttccgcacccgctgccacccccgcccctagcgtggacatttatcctctagcgctcaggccctgccgccatcgccgcagatccagcgcccagagagacaccagagaacccaccatggccccctttgagcccctggcttctggcatcctgttgttgctgtggctgatagcccccagcagggcctgcacctgtgtcccaccccacccacagacggccttctgcaattccgacctcgtcatcagggccaagttcgtggggacaccagaagtcaaccagaccaccttataccagcgttatgagatcaagatgaccaagatgtataaagggttccaagccttaggggatgccgctgacatccggttcgtctacacccccgccatggagagtgtctgcggatacttccacaggtcccacaaccgcagcgaggagtttctcattgctggaaaactgcaggatggactcttgcacatcactacctgcagttttgtggctccctggaacagcctgagcttagctcagcgccggggcttcaccaagacctacactgttggctgtgaggaatgcacagtgtttccctgtttatccatcccctgcaaactgcagagtggcactcattgcttgtggacggaccagctcctccaaggctctgaaaagggcttccagtcccgtcaccttgcctgcctgcctcgggagccagggctgtgcacctggcagtccctgcggtcccagatagcctgaatcctgcccggagtggaagctgaagcctgcacagtgtccaccctgttcccactcccatctttcttccggacaatgaaataaagagttaccacccagcaaaaaaaaaaaaaaaaaaaaaaaaaaaaaaacaacgaggcgaaaccatcacccaccgcaggaaagcgctccgcgaccaccactccgcgcggcccgacaagcacagcaacatcacccacgcacgcacccacgaacgcgcgcaccagctacaacaagaggcacacagcgcccccacaaagggcgaccac

SEQ ID NO: 7279 - DNA, 918 bp, Homo sapiens
gtcggatttcgggatatcgtcgaccccgcgtccgccgggaggcggagcttgcagtgagccgagagcgcgccactgcactccagcctgggtgacagagcgagactccgtctcaaaaaaaaaaaaaaaagaaaaacttctctttaggctgggtgcggttcctcatgcctataatcccagcatttagggaggctgaggtgagtggattgcaggagctcaggagttcgagaccagcctgggcaaggtggcaaaaccccgtctctactaaaaaaaattagctgggcttggtggcaggcgcctgtaatcccaggtactcgggagactgaggcaggagaattgcttgaacctggaaggtggaggttgcagtgagttgagatcacaccaatgcactccagccagggtgagagtgagagactgtctcaaaaaaaaaaaaaaacaaaagaaaaacttctctctagctctgtgacgggcagttcagataataccttcaccagatttacctgttttcagctgaagaatgtgagatgaagccttgaaaccctaaaagtgatatggtaactagggcaggtctttctgtacataaaagtgacttaataaacagtgaatttcatacaggtaaaccctattataccctcagttctaaccattggcctatctcttgcgttttgttctaatgtagaattagattgctacttgactagttcaggaactctgtttagatctgataagtcataatcaaatcttgccagggcgggggggtttatgccctgttatcccagcacctttgggaggccaaggcaggtggaccacgtgaaagtcaggaagttcaagacaaagcaggggccaaacatgggcggaaacccctggtatcctactaggaaaataccaaaaatttagcccggggccatgggtcgggtggga

SEQ ID NO: 7280 - DNA, 1514 bp, Homo sapiens
gggcaggtttctagaaagtgttcggctggggcaggcacgctgtggctggctacttcccttcctcccatcccccttgggccaaacgggatcggtgcttctggaaacaatgaccgataaaacagagaaggtggctgtagatcctgaaactgtgtttaaacgtcccagggaatgtgacagtccttcgtatcagaaaaggcagaggatggccctgttggcaaggaaacaaggagcaggagacagccttattgcaggctctgccatgtccaaagcaaagaagcttatgacaggacatgctattccacccagccaattggattctcagattgatgacttcactggtttcagcaaagataggatgatgcagaaacctggtagcaatgcacctgtgggaggaaacgttaccagcagtttctctggagatgacctagaatgcagagaaacagcctcctctcccaaaagccaacaagaaattaatgctgatataaaacgtaaattagtgaaggaactccgatgcgttggacaaaaatatgaaaaaatcttcgaaatgcttgaaggagtgcaaggacctactgcagtcaggaaacgattttttgaatccatcatcaaggaagcagcaagatgtatgagacgagactttgttaagcaccttaagaagaaactgaaacgtatgatttgagaatacttgtccctggaggattatcacaccccaaatgcataatctcattaatgattgaggagagaaaaggatcagattgctgttttctacaatggagcaggatattgctgaagtctcctggcatatgttaccgaatcaactggccttccagaggctaagaaatttctgttagtaaaagatgttctttttcccaaagcgttttatttgaaaggataacttgtgttttggttattttgtattcccacctgtgctggtagatattattaacccattaggtaaatactattacagtcgtggtttctgcagcagctcacactgatgtagctggcgtttataactaccttctttcgctacccgtttcgcattccctttgccctgagatagcatgtcagttggtcatgatgcttggcctggcaggatgactcaaaccttcattacggaagagtctgaaccattagatatcctgcctggatggggttgctgtgattttccattaactctaatcgaaaaacacaggaggactaagaagctctctagacatatcacacatactcttcctgtgtccatgtgttctcattgttcagttcccacctatgagtgagaacatgcggtgtttggttttttgtccttgcgatagtttgctgagaatgatggtttccagcttcatccatgtccctacaaaggacatgaactcatcatttttcatggctgcatagtattccatggtgtatatgtgccacgttttcttaatccagtctatcattgttggacatttgggttggttccaagtctttgctattgtgaatagtgccacaataaacacacgtgtgcatgtgtc

SEQ ID NO: 7281 - DNA, 472 bp, Homo sapiens
gcggtggccaagaggcctcctgtgccccccaagaggcaagagaacccagggcaccccggcggagcaggaggcggggagcaagatttcatgtcagacctcatgaaagctttgcaaaagaagagaggcaacgtgtcctagggacgggcatgatgagtgttccagagggagaagcatcgctgaccccgagcgcaggttttgctagcagattgccctgacatcttgttcatttcagataaaatgtgatgggaaacttctcactgatgtgctcaagtacaggcataaccattaacccagtagagttcagaatatctgcccaaatgtacatatcgttcccatgtattttaacctaaatggaatgtatcttcccttccaagctgcctaaagcgctgttttaggttcatttattttattatgttcagaagcatcaaataaaagttaaacgtttttccggaaaaaaaaaaaaaaaaaaaaa

SEQ ID NO: 7282 - DNA, 2197 bp, Homo sapiens
  misc_feature (61)..(76): n is a, c, g, or t
agtgggtgccgctccgccgaccgaagaggctggacatgacaccagtggcatatcacggccnnnnnnnnnnnnnnnntccgctgctgctcgcccctcctcctgcaggcgaaagcaagaagatgacagggacggtttgctggctgaacgagagcaggaagaagccattgctcagttcccatatgtggaattcaccgggagagatagcatcacctgtctcacgtgccaggggacaggctacattccaacagagcaagtaaatgagttggtggctttgatcccacacagtgatcagagattgcgccctcagcgaacgtgagttacctgcttctcacctgttaatacctacttctgtccctaatctctttctgtatgtatgaatgccagttaattctttgaaaactacacatgttcttataagttccccattttccttataactgtttgcccaagcaagatatctctgcccccatcacaatctggggaaagaaacttgaagctggaaatgctttgaaggtcaaggaactggaatcagaagaaactgggaaagtggagtgttctgggaggtgtgggactgtctctgtccacatagctcctttcttcagcttttcttcccagagtgcaaacagtgtttaaacggagtttcaaacaggtttctcctgcttcactggttcttaactgggtttatggttcctggctcttggaacttccctttcaactcccttctctttcctggttttgtgtttaatcttgacacattgaaccttgatattctgactgcctggggtcggtcatgtgctgtgtcatttgccagtaagcaatatgtcctcctgtccatcctgctttgtcacctggcatctggtttggtgtttttcttcctgtttccgcattcagtccttgtggatgatgacggcatcaaagtggtgaaagtcacatttaataagcaagactcccttgtaattctcaccatcatggtaagccttagggtttcattccctgggttgtgcacctgccaggctgggacccaggacacttacacttgtttcctgacttgccctgatgtaggccaccctgaaaatcaggaactccaacttctacacggtggcagtgaccagcctgtccagccagattcagtacatgaacacagtggtcagtacatatgtgactactaacgtcttccttattccacctcggagtgagcaactggtgaattttaccgggaaggccgagatgggaggaccgttttcctatgtgtagtaaggacactgttctctctgtgtgtgctctctactggaggaaagggattcaaagtcatactccattgattggggcctggtcctgccttagatctcagcttttggcttataggttccctggctttggatgtcttgagatttatttgaagaatgtattattattatgtgtgtatttgaagaatgtattatttgatatgtgacagaagtgctggaatttctaaaagagaacattaagccactaaaaacgttaccaagctccagcacttatgtgatgggtttgaaaaaacagaaagtggtatgacgctgtgggaggatgaaaatgacagtggcagggactgagagctgacaagccttggcagcacttaggtcggaagggggaggggggcaccccaaacaggacagtgtaactctgcactcttctactgaggctttaaaaaaaaaaaaactgactatttccatattgctgttggtagcttcttctgcacggtacctgagatcctggtgcacaacatagtgatcttcatgcggtgcgtctctcttccctatcccgatggcctgtccggccatgtgagcctaccacctttgctcaggaggcccctgtgtgaccacagggcagaggcacctagcccgaggggacaccctgtgcctcacaggcacagattacagtagacccttggtgttctctaaacacagtgtccacatgcccttcacaaatcaccagtcaccctgaggcagtcaaacattttctccattaaaatggggtctagtttaactaaacactttgattccccttcaggattccttaatggaggacagttcttgaacaggaaaggttttttcaggttgttaagtactgggcatttgaccagacttcctctctagccacacaaattaccacatgtcatggacctttagggttgttttctggaagcatggctgttaaa

SEQ ID NO: 7283 - DNA, 856 bp, Homo sapiens
  misc_feature (854)..(854): n is a, c, g, or t
ttttttttttttttttttttttttgccatttttttctctttattataaaggttatatatgaacaagaatatataaaatatatatgtataaagagtattttaaaagtgaacatccatgcaatcaccacccaagacaagaaatagaacattgccagcatcccagaagcaccaggtgccactccccaatcacattgctgtacttctccacagaggaaatcattattctggttctggggacagcaaaacacttgcttttctttacagttgtatctcatatatataactatatacccttaaaacaatatagttgttcagtttatactgttttaaactttatacaaatggaatcatgttgatggcatccttctgtgatttgcttcttttgctctatgctatgtctgtgatattcatctatgttgtggttagctatttccttcattttcaccactgtgtagaattctactgtttcaatataaatgccatggtacaatttaaccattctaccattgctgaatatttggttcatttctaacttttggatattgcagtgctgctatgaacattaaaaaatttttttcttggccaccttcctgactgggaagaactttcttgtacatgcttcctaggatacatgttcattagttttcccaaggcattgtattagttagggtcctgacagggaaaaaaataactgtaatgaaagataacctgcaaagatgtatacttcagagtgcaattgctaggttttgagcatgtttatctttaaatttactgagggacaaatttttccacagtgattgttttcaatgtaagagctgacatcatcaccaaaacttagtatcattagatcatttnat

SEQ ID NO: 7284 - DNA, 1827 bp, Homo sapiens
ttgaatttatttttaagaaagaaatactgtatgggacgcgtcggttacttgataacaatgttttaacaagaagcaatgttataaagttagtttcagtgcattatctacttgtgtagtcctatgcaataacagtagtgttacatgtatcaagcctagatgttttatacagatgccatatagtgttatgagccaggctgttgaatggaatttctcagtagcagcctacaactgaatagcaagtggcataaagcatatccattcagaatgaagtgccttaaatatagcagtagtcttttttggactagcactgactgaactgtaatgtaggggaaagtttcatgatggtatctatagtcaagacgaacatgtagcatggtgcctatgtagacaatataagagcttccaattttccttcagatatttttaatattaaatatattttagtgacagagtgccaacttctttcatcaggaaaccttattcaggagggtttttaaaaagtgtttaaatgtcaaatgtgaattggtgatgggtgatggagggttcagagaggagtgatcgtcagatgtgtgaatggacggtttaggtgaaaataatcaactgcatagttcccatgcacgctgggcaatgagaatccttggaaacattggtgatgctatcagttttatagctttatttcttaagggggtagggaaaattagttcccattctttcaacccccttaactgtatagctcttttcctagaatagtgacgcaaatctgcatgaacagctaattgtaccatagtgttcattgatacaatcatagcattgtctatttttctcttcatatttatatgggggggagggcgctggatgcaaaagttgaagatcgtgatgctatgatgttagttttccttagctgattttgagggtttttaaaaataaagcaaggttgactaacctacggccacgggaacaggaccatggttaagcaaccatatagaaagctttgttgaaagaaagtatggcatcttgtaccactgccctgactgtcacaactcctaaccttgccattgcctgcctccccctccccttctccttaagagacaatttctgcaggtggcaggtgagcaagcccaggagaatgctgcaatcttgggggtggttttatttatttcttttttgccaaatagagtgtggattcatttcaggggctagctaagccaagaggcagtggtttgggcttgttgtttgtaacaagaaaatgatccacaccactcccccgattcccgggtgcagaattgtaactcggggttgggcctctatatggagtgaccaaaatgccaaaattgtccatctgcctctgagtagggcaatggaaataccaaaccttctgactttgccaaaaagcatacaagcaacctggtcatacataggatgacaaaattctttctggttgtttttaaacaataaagcaataagaacaaatacaatacataggaagttaaaagcacaaaggaatgaacttattaatatttttgaaaaatgcactgggaaaaagttgatgtcaataacagtataaaacagccctatttcttgataaaaaatgacaaatgactgtctcttgcggatgcttggtactgtaatgttaataatagtcacctgctgttggatgcagcaataatttctgtatggtccatagcactgtatattatggatcgatattaatgtatccaatgaaataatcgacttgttcttgatagcctcattaaagcatttggtttttcacataaaaaaaaaaaaaaaaaaaaaaaaaaaaaaaaaaaaaaaaaaaaaaaaaaaaaa

SEQ ID NO: 7285 - DNA, 3138 bp, Homo sapiens
  misc_feature (40)..(54): n is a, c, g, or t
agagtcatgtgactcgagtaacatggccgctgtctcgtgnnnnnnnnnnnnnnngggcgggagttgttaagcggccagggtcaggtgtgctggagcggggtccgggcccgggttccagggcgaggcggcggagcgtggcaggcaagcctagagcggcgtggtccatgcgccggcgccgggggcagagcggagccgcagactcccctggccccggcgcggccccggcagccgcgggctaaggagtcgcgaggttcccccagctgccaccatgaaccccgagaaggatttcgcgccgctcacgcctaacatcgtgcgcgccctcaatgacaagctgtacgaaaagcggaaggtggcagcgctggagatcgagaagctggtccgggagttcgtggcccagaacaataccgtgcaaatcaagcatgtgatccagaccctgtcccaggagtttgccctgtctcagcacccccacagccggaaagggggcctcatcggcctggccgcctgctccatcgcactgggcaaggactcagggctctacctgaaggagctgatcgagccagtgctgacctgcttcaatgatgcagacagcaggctgcgctactatgcctgcgaggccctctacaacatcgtcaaggtggcccggggcgctgtgctgccccacttcaacgtgctctttgacgggctgagcaagctggcagccgacccagaccccaatgtgaaaagcggatctgagctcctagaccgccttttaaaggacattgtgactgagagcaacaagtttgacctggtgagcttcatccccttgttgcgagagaggatttactccaacaaccagtatgcccggcagttcatcatctcctggatcctggttctggagtcggtgccagacattaacctgctggattacctgccggagatcctggatggactcttccagatcctgggtgacaatggcaaagagattcgcaaaatgtgtgaggttgttcttggagaattcttaaaagaaattaagaagaacccctccagtgtgaagtttgctgagatggccaacatcctggtgatccactgccagacaacagatgacctcatccagctgacagccatgtgctggatgcgggagttcatccagctggcgggccgcgtcatgctgccttactcctccgggatcctgactgctgtcttgccctgcttggcctacgatgaccgcaagaaaagcatcaaagaagtggccaacgtgtgcaaccagagcctgatgaagctggtcacccccgaggacgacgagctggatgagctgagacctgggcagaggcaggcagagcccacccctgacgatgccctgccaaagcaggagggcacagccagtggaggtccagatggttcctgtgactccagcttcagtagcggcatcagtgtcttcactgcagccagcactgaaagagccccagtgacccttcacctcgacgggatcgtgcaggtcctaaactgccacctcagtgacacggccattggattgatgaccaggattgcagttctcaagtggctctaccacctctacatcaaaactcctcggaagatgttccggcacacggacagcctctttcccatcctactgcagacgttatcggatgaatcggatgaggtgatcctgaaggacctggaggtgctggcagaaatcgcttcctcccccgcaggccagacggatgacccaggccccctcgatggccctgacctccaggccagccactcagagctccaggtgcccacccctggcagagccggcctactgaacacctctggtaccaaaggcttagaatgttctccttcaactcccaccatgaattcttacttttataagttcatgatcaaccttctcaagagattcagcagcgaacggaagctcctggaggtcagaggccctttcatcatcaggcagctgtgcctcctgctgaatgcggagaacatcttccactcaatggcagacatcctgctgcgggaggaggacctcaagttcgcctcgaccatggtccacgccctcaacaccatcctgctgacctccacagagctcttccagctaaggaaccagctgaaggacctgaagaccctggagagccagaacctgttctgctgcctgtaccgctcctggtgccacaacccagtcaccacggtgtccctctgcttcctcacccagaactaccggcacgcctatgacctcatccagaagtttggggacctggaggtcaccgtggacttcctcgcagaggtggacaagctggtgcagctgattgagtgccccatcttcacatatctgcgcctgcagctgctggacgtgaagaacaacccctacctgatcaaggccctctacggcctgctcatgctcctgccgcagagcagcgccttccagctgctctcgcaccggctccagtgcgtgcccaaccctgagctgctgcagaccgaagacagtctaaaggcagcccccaagtcccagaaagctgactcccctagcatcgactacgcagagctgctgcagcactttgagaaggtccagaacaagcacctggaagtgcggcaccagcggagcgggcgtggggaccacctggaccggagggttgtcctctgacaggcctggcacggaggagggcccaccgagtggtcccatgaaacactaagggtcgtcacgccctcccgaggagctcaaggacctgcctgtcaggaccagggctgggcctgccaacccagggcagtgttggggccggaggctgctgtgtctgcccaagctcctctcagagtccagtccccaggcctccagcgctgtcagctgcaccctggcattctcacagagctggctgcccacccagtggggggctatagcctcagagaccactcatcctctggaatcaacctctttctaataccctcttggaaaaagagcttgcccctcctccagcacactagagctctggccttgtgtgtatatgtatacatacgtgaacacatgcctgtgtgtgtgtgtgtgtgtgtgtacttgtatgcacgtaggcaccagcacaaagatctgaatgatgcaccccacccccaccccaataaagaaataacagaaaaccctcaaaaaaaaaaaaaaaaaaaaaaaaaaaaaaaaaa

SEQ ID NO: 7286 - DNA, 628 bp, Homo sapiens
  misc_feature (37)..(37): n is a, c, g, or t
cttctgttgctgcccacgcctccctgggcagtgcttntaaaggtgccagagcctcaccacagtgccactctggctgggcaggggttccctcagcttcccagagtgcacatctgaaggtgcctaccctgggtgaggggctggtgggcaggaaggtaaaggggagaccatttgagcagccgccacccgctccccagtgcctctgtatggccctatccagggacacccatgggcatgcgcacatggcaatcctgaccaccacctgagcacaggtgccccctcgggaccaccccccttctctttgtttccatcagaataaccaaaagcatttaaacgtgttacctttctccatccatctagactccagaaacaaaaatcaacacaaatctttattttttgatttaaaagatataacaaaaaattatggggagagtattcattatggcaggtgtctgtctgtaagaaaaaaatatatatctctatgtcatatagcgtgttagcaggtttattttttaaatgaaaggtaagaaagaaattgatttgaaatatataccacaagaagtcccgtgtcctgtcaaactgtcagtattttataaataaactttttttttggaaatttgaaaaaaaaaaa

SEQ ID NO: 7287 - DNA, 2818 bp, Homo sapiens
aatcagagcccgtgctctccctagtgccggccaatgggaggtgcgctcgggctgcttccggctccgcgctccgctcgccccctcccaaggtctccccgcgactggcgggacgcaggggcgggcgtcggccgcggtgacgcgcagcgggcctggagccaataaggggcgggctcggtgctgatggacggtgctggtggccagtggagaggcgctggccgcacttcccgtcggggagagagtgtaatatggcgaagacctacgattacctgttcaagctgctgctgatcggggactcgggggtggggaagacctgtgtcctgttccgcttctccgaggacgccttcaactccacttttatctccaccataggaattgactttaaaattaggaccatagagctcgatggcaagagaattaaactgcagatatgggacacagccggtcaggaacggtttcggacgatcacaacggcctactacaggggtgcaatgggcatcatgctggtctacgacatcaccaacgagaagtccttcgacaacatccggaactggattcgcaacattgaggagcacgcctctgcagacgtcgaaaagatgatactcgggaacaagtgtgatgtgaatgacaagagacaagtttccaaggaacggggagaaaagctggccctcgactatggaatcaagttcatggagaccagcgcgaaggccaacatcaatgtggaaaatgcatttttcactctcgccagagatatcaaagcaaaaatggacaaaaaattggaaggcaacagcccccaggggagcaaccagggagtcaaaatcacaccggaccagcagaagaggagcagctttttccgatgtgttcttctgtgaggaacaccgccttactctgagcctcgctcagcccagctgactgtgcctgttctgagtgagcccctcactcagccggggccctcccacctccaacgccccgcccacgccgcggccaccgggcccacggccaccagaatgcaattgagaaatcgtttattttagtaactgtctgatctttttcaactttggagatggaataagttaaaaatttgctatttttcctgtaacatctgctgaacgggcccacccacacgttgtatattcagagagagagagggagtcaaggtgtgaccgtcgaccacagccagtgtcaggcctctgcctctgggcctttgctttgtggcctcactgcaacacaaagctccaccaggaggctggttcacgtcccctaccacggaagcgaggtcccagaaggccagcggtggttccaggagcaacagctcccaaaccctgagcaaggcaaccgatcgccaggaccaggaagcatcacccaggagatttggcgcccacttccacctcttctctcagttttggacaagtgacaaaccattttgccccctcactcttcttttttaactgttaaaccaaaggaaagcacaaatgaaggaaatcctgtgtaaagcattgagaaggaaagaagcctggagcagcctctcctgtccacagccaggggttaggtctgcaggcccgtctgcggtccccatcgagcatcaaggggacgctgtgtgtgctgcaagtgaccccgaaaacaaccacagccgtcacatggtcctcctgaagttggggcaccctcctctcagcaccaaaatggcccccactccttcgtgtcctcccgctatctccaaatcggacgttctttctagctgagatttttatttttccacatctgtagtgccatgaagcgattctgtctttgacttccaatggcaaacctgggtgatcgggaacaagcacgttgtacccttggctggacatggccaagacacaaggcattccacggcggcaagctgaccgcacagcagtctggcttgattttcagccgtcatcattgggttctgttttgacagctctgctgtcccatagggactgcgactgggaccaggtcaaccacgccaggggggtgtcaccagccttttctttttttctttctttttttttttttcctccttaagctgctgtcaatccaaaccattggcatcatcgtttcttttcaattaaaaccaacatatcagcaatagtctgctctccccgggaatctctaacatgctctgtttacatcgataaatgcacttaaggaaaacaaacaaattaaagctcatcttaaagtccaaaaaaaaaaaaaaaaaaattttccctgtaggccacacggacatggccaggtgctgggggtgggtctggacaagatggtagagcccatggattaccccatcgagcggccacctcagaggagatgccacccatcatcaaaagactaaattgggaaaagaagcctcctggcttggtgcagtggctcacacctgtaatcccagcactctgggaggccaaggcgggctgatcacttgagctcaggtgttcgagaccagcctggccaacatggtgagcctgcgtcacctggcttctggcacacagctcggccactgtgtccctcctgcctccctggcaggtccttctaggggccctctcctggctggctttccagggcattccttccactctatccagggtccttcccaagaccacacccaggtccagtcattccctaggacttggcagagagctgtactcacagccaagatcacagcaaaatcagcaaagggaaaaggcatgcagagtgaagtccagaggcaaccagacagaagcatccagaatcctctcacagtggggtcacacaccccatgcttaactcccccaacaatgagttgtaacaaaaaaaaaaaaaaaaaaaaaaa

SEQ ID NO: 7288 - DNA, 5065 bp, Homo sapiens; identical to SEQ ID NO: 5900
  misc_feature (520)..(614): n is a, c, g, or t
  misc_feature (4376)..(4392): n is a, c, g, or t

SEQ ID NO: 7289 - DNA, 2373 bp, Homo sapiens
aatatttatgtatatttatgtgtgtgtgggataagtgtggatatgtttatacatactcatatgtatgtttgtgtgtgtatctgtctgtgcctgcctccattttcttttgctttagagaggctatacttgaggctgccatcaagagtgagaagtttgaagctggaagagcctgcatgggcccttcttgaactggtgcagcatgtgcagcatgacatcactcaagagttcttgtcagagtgataatgaatgtctggctattgtaaacgggaacaagaaaactatttccagctgtgtgacaaccaagacgacaaaaagcattgcagagaatattattgccacaaggaccctgcttcatctgggtctcagacgacgggaggaggggcattttggagcacgtgtttggcatctgtgaaccttttgttaggtagaaaacaaggcctgaatgaaaggcctttcaaccacttctggagcagagaagataggtagagttactcattataggcaggtttcattgtaggagtattcagtgaggacccccgccttggaagtctgtaatcagcatatgataaggatggtgtgttcttactaagagaataacacaactgaaacagaattgccttttgttaaggggatgctttgccttcttggactacgattgtggggagaaggattattgtcaactaagtgaggcattcattctgtacccactatttattgtagttccacagagaactgcttgctttactttctgactaggcacagaaaagtaaaggttcaaaggctagggcaagatgactgacttttccagatttagcacaatctgttctctggtcactttgagacgctgtcaatttagtttcatgcagctgatatcttggagaacttctgtgtccttacgtttggctgaggacactaaatttttttttttttttttttttttttgaggcagagcctcactttattgcccaggctggagtgcaatggcacgatcttggctcactgcctcctgggttcaagcaattctcttgcctcagccttccaagtagctgggaccacaggcgtgcaccaccatgcctggctaattttttttgtattttttggtagagatggggtttcactgtgttggccaggctggtcttgaactcctggcctcaagtgaaccacccgcctcggcctctcaaagtgctgggtttacaggcccaagccaccgtgcctggcctgaggacactaaaattaaaaaaaaattaagaaagtacggtccccgctcttgagtagctcatgaacatggagcgacatggactcaaatgattaagatcaggtaggtagtgatgaatacggtaaaccaaggttcaaacaaagagctgtctgcatatctgaggatggagagggtaagtcagccttagaggagggaaatgacttgcagcaggatgccagcctcaatggtctgtggagctcattccatgcagaagagtaatgaggaagacccagtgagtgacaggcttggggaggagtgcctgaaattgacggtttgtggcaggaagtggtgggaccaatctcgaagcttgtggaggtagaagggtactggagactactgtggacaaaaaagggcatgttgatgccattaccaggcaggacacgagagcatgatgattgttgcagtgaggcttgttagttttagacatgtctaaaaccatgcaggcagagattttcagctggtggctggcaatttgagtttgaagtttagctgagaagtcagttggcagtattcaggcataattgctaaatgtagaagtaagtgccagtaaaatgtgtgtgataagctggagagcacttttagagtgaaaagattgatatattttaacaaggacaaggcttatttcaattctttaggttatttttctttagcagattaaagtagttttatcggttatcaagcatttgttgagcgtttactatggcttctcttgataggtggtcctggggagataggaaggaaatggtgcaaatttcaacaatacccactggggtgaacaaaaaatccctgaaacaccccattccagctattgttatctggaaaaaaatccttacaataattagatggtgatttgacgtctgggggaagttgcagatatagttttaatttactgtaggactagtggcagtgagtctcatattgctgtcatataaaaggtaaaccttccagaagaactttggaaatttcagtagcctaaagaccacgctttgagaaactcgtaaaggtttgtcatagaggttttaaaagtctgatcaaataattttaagctttagttgcctactaaaaagtaggatgcagtacaagtttgtcctttacttggtaaaaaaaaaaaaaaaaaa

SEQ ID NO: 7290 - DNA, 530 bp, Homo sapiens
tttttttttttttttcagtgaacatgtttttattgaacaccaacttaatttcaggaacatttcaggtacattgtcagaaataaagactcttaagaatgtattattatgtacccaatactggtttcaggcctttacatgtattctcatgaaactctatgaagtagatattattatcaatattcctactttacagatgaggaaacccaggcctggagaggtcaagcaacttgctcaagtggcacagctggagagtggggagctgggacttgagcccaggtagtgtgtccccagcaccttcaactaaactccattctgtgctgccctttggaacacccactcaatggccttcacactccatgtcctacttgggaggacatgtgatctcaacagcactcacaaatgaaggctttccagacaggatattgaagatggtaagatcagtctcatgtataaagcattttttaaaagtaaagcatattatatgctagtcatatgtactagggtgaatgcatgtatgctacatgctagta

SEQ ID NO: 7291 - DNA, 644 bp, Homo sapiens
ttttggtgtgtgataatttttagttgagtgccagacatcaagcatagaagagcagtagagactgaggtaaatagtatttacggctggaaatcaacatgcctcttcttctgtgaagttgtcagcatggaggtgagaaggctgagtcaatctcaggggttgacctgagtttgagttttgttgttacttccagtgcaccacagccttcacattcttacaaaggtagactgcggttatcttgaactttgagttggagctggggtgccaggggctttttgtgtgagtgttcttgacctccctcaacttccagccatcctgcatgcctgggccttaaatgaggtaattctccatgctcctactcttctccccagcagtggcctgctcttcccttattacaacatgttaaggctggcaggaatgggcatgttctcttttgtcgtgctccagcttcagtattaggcaggctctgtacatctggccctctaaggtgggatttcttttccatgtttagcaatactttcgtcttctctgtggcagcaaaacctgtctcacttgcactggtcttgggtgagtttcttgctcctcccccagcagtagtcgacccctgcttgttttttttgtgtttgtttttgatttttttttttttt

SEQ ID NO: 7292 - DNA, 1215 bp, Homo sapiens
tggggggggggggggggggggggggggggggggtggtggggggggggggtgttgtggggggcgcggtcgatttggcctttgggaccggatttccctggaagaaggggcggaaagggaggcagggcatcaataccctttttcgggaccgagaagagcttttttttttttttttttccatttgcaaatcataaggaagtttttattgggtcctgtacagaagagaaatgctccgttgtcaaaaaactacaaagggatccctggctctgggtgtgctatgaagacaactccctccccagtgagcccagggaacaggctggatgctggacaaagtttgggagggagctccaggcccagggtcctccacttggggtctccccctttatgtttgtaaaaaccgcaggattggagtatttagaggactctgtccccctgcaagtattgccgttggatatgaaacacacagagcaaaaccccaaggtgacaaatgagtgaaaacctaaggtgacaagtggacagacgccccccagatggaggagacactgggctagctgggcgacctttgcccctacgtaacttgtcagtccttgaaggcacagcagcattggccagagatggcccctcccgcggccagggctggattgcagttccctgccttgctcacctgtggccacagctcatacccccagttaccccacagccagggactggaggggcctctgaagcacagacaggcttaggcagcctcccacccccaccccagcagcttcttctgggagtgggaccctatctgaaggatgaagagatgggcttggccacctgagggccagaaggaactgggcacaggcaggctctatgctcaccttggaattaccccaggtcttcatattgtggggccacctgtgtagggctagggttctggaggagacagccttctcatctaccctatttcactagctcaaggttatagctgttcctggttctccttagcctgggaagacccaggcaccatggcaatgcccaggcctgtaaggggtctgcccaggatggaaggcaaagaaatacattgctcccaggggttggacgcctgcccgggaccaggccttgagctgagaacctggaagcccctgccaggatcccttcctgccaggcctgcacgggtggggagtgagctggggatgacgcagggacacggaaggccaggcacttcgatctcgg

SEQ ID NO: 7293 - DNA, 2516 bp, Homo sapiens; identical to SEQ ID NO: 5715
  misc_feature (475)..(489): n is a, c, g, or t

SEQ ID NO: 7294 - DNA, 1804 bp, Homo sapiens
agagactgtgtttctttagttgagaagaaacttcattgagtagctgtgatatgttcgatactaaggaaaaactaaacagatcacctttgacatgcgttgtagagtgggaataagagagggctttttattttttcgttcatacgagtattgatgaagatgatactaaatgctaaatgaaatatatctgctccaaaaggcatttattctgacttggagatgcaacaaaaacacaaaaatggaatgaagtgatactcttcatcaaacagaagtgactgttatctcaaccattttgttaaatcctaaacagaaaacaaaaaaaatcatgacgaaaagacacttgcttattaattggcttggaaagtagaatataggagaaaggttactgtttattttttttcatgtattcattcattctacaaatatattcgggtgccaataggtacttggtataaggtttttggccccagagacatgggaaaaaaatgcatgccttcccagagaatgcctaatactttccttttggcttgttttcttgttaggggcatggcttagtccctaaataacattgtgtggtttaattcctactccgtatctcttctaccactctggccactacgataagcaggtagctgggttttgtagtgagcttgctccttaagttacaggaactctccttataatagacacttcattttcctagtccatccctcatgaaaaatgactgaccactgctgggcagcaggagggatgatgaccaactaattcccaaaccccagtctcattggtaccagccttggggaaccacctacacttgagccacaattggttttgaagtgcatttacaaggtttgtctattttcagttctttactttttacatgctgacacatacatacactgcctaaatagatctctttcagaaacaatcctcagataacgcatagcaaaatggagatggagacatgatttctcatgcaacagcttctctaattataccttagaaatgttctcctttttatcatcaaatctgctcaagaagggctttttatagtagaataatatcagtggatgaaaacagcttaacattttaccatgcttaagttttaagaataaaataaaaattggaaataattggccaaaattgaaaggaaaaatttttttaaaatttctctaaatgtaggcctggctgggctttgaccttttccgtttttaaatcactcacagagggtgggacaggaggaagagtgaaggaaaaggtcaaacctgttttaagggcaactgcctttgttctgaatggtcttaagaacattaccagctccaggtttacattggttcaagttctcatgccagtcccaattaggctgatcatcgttgagcatgagcgaccaaaatcctttggtcctccacgttaggtttgctttaaaatttcttggaaaagctacttacttttgtcgcaggtgcccttattcagcttaaaaccttgtgtttcgaggtaagaatggggatttattaaggtgacatcaagctgtgcacccttgtgtcataagattattttatagctgaagccaaaatatgcttcaaaagaagaggactttatggtcatggttagttcatacactcaaagcatctgactggtagttctatagcaagccattacctccattatgggaggaactagcttaatgtccagtggattggggggggggccccgggcacacaacactcggggggaaaccaatcacccggcacttttggcacaccagtgtaaataggtgccctccggggggttccgggcctaacccttt

SEQ ID NO: 7295 - DNA, 2723 bp, Homo sapiens
tctggccaagaagacccactcaattgcctttgagattaaaaaaaaaaaaaaaaagaaagaaaaatgcaagtttctttcaaaataaagagacatttttcctagtttcaggaatcccccaaatcacttcctcattggcttagtttaaagccaggagactgataaaagggctcagggtttgttctttaattcattaactaaacattctgcttttattacagttaaatggttcaagatgtaacaactagttttaaaggtatttgctcattggtctggcttagagacaggaagacatatgagcaataaaaaaaagattcttttgcatttaccaatttagtaaaaatttattaaaactgaataaagtgctgttcttaagtgcttgaaagacgtaaaccaaagtgcactttatctcatttatcttatggtggaaacacaggaacaaattctctaagagactgtgtttctttagttgagaagaaacttcattgagtagctgtgatatgttcgatactaaggaaaaactaaacagatcacctttgacatgcgttgtagagtgggaataagagagggctttttattttttcgttcatacgagtattgatgaagatgatactaaatgctaaatgaaatatatctgctccaaaaggcatttattctgacttggagatgcaacaaaaacacaaaaatggaatgaagtgatactcttcatcaaacagaagtgactgttatctcaaccattttgttaaatcctaaacagaaaacaaaaaaaatcatgacgaaaagacacttgcttattaattggcttggaaagtagaatataggagaaaggttactgtttattttttttcatgtattcattcattctacaaatatattcgggtgccaataggtacttggtatagggtttttggccccagagacatgggaaaaaaatgcatgccttcccagagaatgcctaatactttccttttggcttgttttcttgttaggggcatggcttagtccctaaataacattgtgtggtttaattcctactccgtatctcttctaccactctggccactacgataagcaggtagctgggttttgtagtgagcttgctccttaagttacaggaactctccttataatagacacttcattttcctagtccatccctcatgaaaaatgactgaccactgctgggcagcaggagggatgatgaccaactaattcccaaaccccagtctcattggtaccagccttggggaaccacctacacttgagccacaattggttttgaagtgcatttacaaggtttgtctattttcagttctttactttttacatgctgacacatacatacactgcctaaatagatctctttcagaaacaatcctcagataacgcatagcaaaatggagatggagacatgatttctcatgcaacagcttctctaattataccttagaaatgttctcctttttatcatcaaatctgctcaagaagggctttttatagtagaataatatcagtggatgaaaacagcttaacattttaccatgcttaagttttaagaataaaataaaaattggaaataattggccaaaattgaaaggaaaaatttttttaaaatttctctaaatgtaggcctggctgggctttgaccttttccgttttaaaacactcacagagggtgggacaggaggaagagtgaaggaaaaggtcaaacctgttttaagggcaacctgcctttgttctgaattggtcttaagaacattaccagctccaggtttaaattgttcagtttcatgcagttccaatagctgatcattgttgagatgaggacaaaatcctttgtcctcactagtttgctttacatttttgaaaagtattatttttgtccaagtgcttatcaactaaaccttgtgttaggtaagaatggaatttattaagtgaatcagtgtgacccttcttgtcataagattatcttaaagctgaagccaaaatatgcttcaaaagaagaggactttattgttcattgtagttcatacattcaaagcatctgaactgtagtttctatagcaagccaattacatccataagtggagaaggaaatagataaatgtcaaagtatgattggtggagggagcaaggttgaagataatctggggttgaaattttctagttttcattctgtacatttttagttagacatcagatttgaaatattaatgtttacctttcaatgtgtggtatcagctggactcagtaacacccctttcttcagctggggatggggaatggattattggaaaatggaaagaagaaagtaactaaaagccttcctttcacagtttctggcatcactaccactactgattaaacaagaataagagaacattttatcatcatctgctttattcacataaatgaagttgtgatgaataaatctgcttttatgcagacacaaggaattaagtggcttcgtcattgtccttctacctcaaagataatttattccaaaagctaagataaatggaagactcttgaacttgtgaactgatgtgaaatgcagaatctcttttgagtctttgctgtttggaagattgaaaaatattgttcagcatgggtgaccaccagaaagtaatcttaagccatctagatgtcacaattgaaacaaactggggagttggttgctattgtaaaataaaatatactgttttgaaaaaaaaaaaaaaaaaaaa

SEQ ID NO: 7296 - DNA, 1693 bp, Homo sapiens
aaattcgaaccacatcaaagaggagaagacgcggtctcagcggtgcgcgtattgatactaaactgtaacgacactacttgtggtgagtatcactcccgtcttgttatatcctccttcacataatagttcaggtcttctattctcttttgggtacattagacagactattttgtggtttcatcatatatatagccttgtgataaattcccccccttgagttgtgccttctatgctccgccttatccacattcccaggtgaatcaatcctggtgcccataatcattgtatttgcccactctttctgtcagcctatgctttacccgccccttcaatttctaaccgtggatatgatggatattccgaaagggattggggctcttatgagtgcagaaccagcttttaaggttagtcattattaagggaggggaggattctatatcgggggccgaaggaacctttgaaagggctctctacttttatgaacagggctataactactcctggccatggcggtcagtcaatatcaaggttgggaatccatatataagtaatatttttagttgtcttggaatatttactttggcaaaagtacaacagctaccaaaatatacatctcaaattgtgggtagattcattaagacctttttaactctatcattacaagatatggcaagtcgtgtgcagttgtctggacctcaggaggcagagaaatacgttctgcacatgatagaagatggtgagatttttgcaagtattaaccagaaggacggtatggtcagtttccatgataaccctgaaaaatataataacccagccatgcttcataacattgatcaggagatgctgaagtgcattgagctggatgagcggctgaaagccatggaccaggagatcacagtgaaccctcagtttgtacaaaagagtatgggctcacaagaagatgattcaggaaacaaaccatccagttattcttgaaactaacatccatcctgagctaaacaagagaaactaccatcttggccagtgacaagtgttcggagggcagcagagaggaccaagcctgtgtcacctggagactaagaaattaagttttgttttgacatcttcagtcctgtgtgctttcagaaaaccattttctctgcaaagaaaggaaacagatttgcaaactttaaagtctgtcgtggatttatttatcctcagattattgttactgcattaaatctacctttttgttttaagttgcttgaacaataaaaaaaaaaaaaaaaaacaataaaaacaataataatcaaaaaaaacaaccacaacacataatcacatataaaaaacaacaacatacacaacaaaaaaatataaactacactccgcccaccatacaaaacacactatctaatacaagagggaccctctatggcggccacatcagaaagcaggcgtagaataaaactcgtggaggaaaacccgaacgccatataggacacgcactagtggggagaaatgagcaccacaaagaatacgcccataacacactacccaaatatttatcacaccaacacattcacacacgactcacgtatttatttagccctacaaaacactcgcaattacactacaacattcctatcacctagcaccatcaacaaactacaacttcacccccatcaccacacaaacacgcatacaaaacaaaaaa

SEQ ID NO: 7297 - DNA, 796 bp, Homo sapiens
tttgactttttaatgatattgaagtagtagttccctgaaaagagctactatgatcacatggcttggttaactgtttcttacaagtctgagcatgaatttaacacacacgaactatacactgacaaagacaggatgctcctgaaataaaatcacagcatcttattgcatatactacatcatccaaggtcaaaaccctttcatagagacatttaaaactataaccaagtaaaagagaaaatagatgcaaatttgcttttacaaaatttgaaaatcaaccaaaagagtaaggcacaagatgcagtcagctacaaagcacttcagagaacagcgctttgctctcaggtctgggacccaccccctgggcaaggccgcctggcagcaggcaggaaccaaacccctgccacctccactcactcccagggttcctctttgcaggatggtggggagcgcaggcaccaaggcaggaaggccagggcaggaagatgccccgcgtccttcactttccctcagtgtgagcacaccaagttccctctaaccaggagaacaggaccctaggcaccaaaagtcaagcatgagggactgccacaggatctcgggcaggtgtctttcagatgctaaagtgccagggtttgcaggatacttggatggtttacagtgatgatgagttggagtctttaaactcaatggtgtccctaaaactcacttaggatgatagggatccccatcatcccggggttgggcactgaactgggtacgaagctgggctaaaatcaaaacccgcatccatagggagaaa

SEQ ID NO: 7298 - DNA, 1066 bp, Homo sapiens
ttttttttaagagatagagaagtttttactcatgcatttgtcagaattctttcagttgcaagtaagaaaagaccacttcaagccagcttgagcacagagggaactgattggcacacatccatgaaatgtctagaggtgatccaccagcttcagacatagctggatccagggatggatctgatgcccttgtggctcagtctctctccgtctcagcaatggtctcctgtcttggctgtccattctgtggcatgatggatgctggagagccagacttcctttccctcttcccatcaggctcttcccccgactccccacccacaacctgccccagtgcagatcagggtctcaggatcttaaaggttcagctgggtcacacatgtccatccctgcacctgtcactgtgcccagggggatggaatgtgtggattggccaggcctgggtcacacggcccagggactggggtgaaggagtgagctcctagggtaagtgcagatgctgatcctggaacagagacagggctgcttgttgggggtgggggcagagtggggtggttcacaagcctcagtgcctccatttctggttcctggcattcctgaaaagcccggagcctctgctttctggcttcatcttcccttcagcttcaccaggactgccctgcactctaaatttcaccatcatcctttcctttcagctctgggcttttgccactatggttccctccacctggaatgcccttgccctactcgtgttgaaatccaacacgtcctctaagggttcagggcccccacctccccttctccctttgggtcagctctgcctaccctccatggtcttccgtgactacctgtgtcatttcctccacttctccacccacgtggcttggcattagggttgtctgtggatgagtctcccccaaccaggcgtgggtctgagcacattgctgttccccatggggaggaagggaagggatcagctggttatggagcgcctactgtataaaaggccagagctggacactcaagaaaaaaaaaaaaaaaaaaaaaaaaaaaaaaaaaaaaaaaaaaa

SEQ ID NO: 7299 - DNA, 3231 bp, Homo sapiens
  misc_feature (748)..(823): n is a, c, g, or t
  misc_feature (1162)..(1182): n is a, c, g, or t
cgcggcgcacttggacttccctctccattcgccagccgcctcgctcccggaccccacggctgcaaactgatctggcgcgcggggaggaggagagcgcaggcgagcgaacccgcgagagagggagagagcgagcgagcaacagcgagagcgagagcgagagagccgggaggcagagggagtagtgaccgccttccggagccgggattcatgcctgtcctcgggaccagcgaaggggactttacggctgagtatgagccaggctgctaggagccaggtacccccacgcctgcagtccccgcgccgtgcccggaatgcgagctggacgcagggctctcccaagttcccaccgagccgaataaaaagcgtccgcccgcagctctccgccaaagacggacattgactccaggactccacagaatggagcaagaatgagaggaaaaaggccggcagaaaagcatgaactggaggtttgttgagctcctctacttcctgtttatatggggccgtatctcagtgcagccctcccaccaggaaccagctgggacagaccaacatgtctccaaggaatttgattggctcatttcagacagggggcctttccaccactccaggagctacctatcctttgtggaaagacaccgtcaaggatttacaaccagatataaaatatacagggagtttgcccgttggaaggtgaggaaacacagccatcgcgcaggacgagatctggtcgccatccagtgcccannnnnnnnnnnnnnnnnnnnnnnnnnnnnnnnnnnnnnnnnnnnnnnnnnnnnnnnnnnnnnnnnnnnnnnnnnnnatcatcaaaaagtacggcacccacctgctcatctcagccacattgggaggggaggaggctttgaccatgtatatggacaaaagtcgcctcgacaggaagtcagggaatgccactcaaagtgttgaagctctgcaccagctcgcatcatcctactttgttgaccgtgatggtaccatgaggaggcttcatgagatccagatatcaactggagcaatcaaggtcacagagacacgcactgggcctctgggctgtaacagttatgacaatctggactctgtgagttccgtccttctgcaaagcacggagagcaaactgcaccttcaaggtcttcagataatnnnnnnnnnnnnnnnnnnnnngaagtttgtccagtcggccttgagctatatcatgtgcaatggggagggggagtacctgtgccagaacagccagtgtcgctgccaatgtgccgaggagtttccgcagtgcaactgccccatcacggacatccagatcatggagtacacgctggccaacatggccaagtcttgggccgaagcttataaggacctggagaattcagatgagtttaaatcatttatgaagcgcctccccagcaaccacttcctgaccatcggaagcatccatcagcactggggcaatgactgggacctgcagaaccgctacaagctcctgcagagtgccacggaggcacagagacaaaagatccaacgcactgcccgcaagcttttcggcctcagtgtacgctgtcgccacaatcccaaccaccagctgcctagagagaggacaattcagcagtggcttgcaagggtccagtcactcctctactgtaatgagaatgggttttggggaaccttcctggagagccagcggagctgcgtgtgccacggcagcaccacgctgtgccagcgccccatcccctgcgtgataggcgggaacaacagctgcaccatgtgcagcctggccaacatctccctctgtggctcctgcaacaagggctacaagctgtatcgaggccgctgtgaaccacagaacgtggactcggagcggagcgagcagttcatcagctttgagactgacctggacttccaggacctggagctgaagtacctgctgcagaagatggactcacgcctctacgtccacaccaccttcatcagcaacgagatccgcctcgacaccttctttgaccctcggtggcgcaagcgcatgtccctcactctcaagagcaacaagaaccgcatggacttcatccacatggtgatcggcatgtccatgcgcatctgccagatgcgcaacagcagcctggaccccatgttctttgtctatgtcaacccctttagcgggagccattcggagggctggaacatgcccttcggggaatttggctacccacgctgggagaagatccgtctccaaaacagccagtgctacaactggactcttttgctgggcaatcggtggaaaacatttttcgagacggtccacatctacctacgtagtcggactcggctacctaccctactgcgaaatgagactggccagggccccgtggacctgtcggatccctccaagaggcagttctacatcaagatctcagacgtgcaggtgtttgggtatagcctgaggttcaacgccgacctcctgcgcagtgcagtgcagcaggtcaaccagtcctacacacagggcggccagttctattcctcttcgtcagtgatgctcctcttgttggatattcgggaccgaattaatcgcctggcccctcctgtggccccggggaaaccccagctggacttgttctcctgtatgctgaaacaccgcctgaaactgaccaacagcgagatcatcagggtgaaccacgccttggacctgtacaacacggagatcctcaaacagtcggaccagatgacagccaaactctgctaacccgggactccttgccatggacttttcctgttgttgtacacacacaacagaacaaaatgaagcaaaacaaaacaaaaaaacccacaaaaatttgtaaaatgtaattaatattcaaagaaaaggaggaaaatcttcatttgttggaaatgaaaacgttctagcaactgtataaaagcgttgggcatgtttgttatttctatactcactctgtcatgaagaagggtctcagccttttgtggagcattgagggagttgcttcttaggcctcaggtgctgtattgggggagaagggagaaagcatatgcaatgaattgtaaagatctctgctgtgcaggtgctaagattaaacactaaaaagaaagagagatatatgtaatgtacaactgacactgccatttttcctttttggaggaaatggacatagataaagaagatatttcttcggttaagatttaaaaaaaaaaaaaaaaaatgaggaaaca

SEQ ID NO: 7300 - DNA, 828 bp, Homo sapiens
ttttttggctgtgcaggttaaaaagttatttatttatttatttgcttttggaaaaactcgagtcagcttgatgaggtcactttttcctgctactccttcttatttggggagtaaagggacttccatgatctggatggatgattgtgatgaggaggttaccgggattgccctgagagaatggactgtgagctttcagggatggaagctgcatcttcatctctataatcccttgtttggcacagtgtcagcctgagaagatgcttggcggcaaatatgaattatggcacacactgttaatttcttatccatgagcagttcctttgcttgctaacagaaaatcctgattttgcttggataaacaaagtgtccagtgtcaggtgatgactcaaggttggtttaagccaggctggggccttttgttcctttttgcctgatacttgaaagagtttacagtagggactgtcctgtggtccacttctggataatgagacataaggagaagtctgctgtgtccttctaagaagattttcttcactggttaaaggcgagagacacatcaagaaaagccccctttgacatagcttcctccatcttgtagcctggagtctgaactaggtccatgaatggctagagctataaacagccatcctgtgatcatgaagctccaagggtataaagcagtaatattcaggaaggtggagcctttggacaaaatgataacaggaatctggggcctcagctacatcactgagccttttcaagtccttgccttcttcctcttaaatcctgttatgttacataactcaatgtctttattgcaaaagccac

SEQ ID NO: 7301 - DNA, 6641 bp, Homo sapiens
  misc_feature (19)..(20): n is a, c, g, or t
  misc_feature (34)..(34): n is a, c, g, or t
  misc_feature (68)..(68): n is a, c, g, or t
  misc_feature (3908)..(3937): n is a, c, g, or t
cgttttaaacgacggccanntaattttaatacgnctcactataggcgaattggtaccgggcccccccncgagtttttttttttttttttttttttgttcagagcaaagtcatttttattgtaatgaaattttaaaaggcagttacattagttacacatatacacaaccgacttaataactgttagtcatagagaacattcaagaaatacaaatgatttatccacagcacagttcacatccataagaagaaagagaaatggttaagtgcttaaactgtccactgacacctgcttatgaaatcttttcctttctttctttttttaaaggaaactgagattgttagatgaagcaagccgtcctgctcccgcacagcctgtgaaacctccattttgccactttcaaggtcagtgccccacagaccctggcctgttgttgaccataacactagctttggccacaaaagccagggacacctacgcttggaaatgtgcctgcaccactgtgtggtgcctccttaagttgccccagactccagatggtcaaagaaaaggtgaatgtccaggtggctcatggctccttagtatggggtgtttggtggggaatgaccccggcaggttaggagacagcgacttaggccaagcccatattttctggtaatataaaggacacttctattctgacttgttattcctagagctgttccggtcactggcttcttcctgtttatgtggtaggtcagaaccgtgacggagcaaggtgagcgttcacattctcgcatagcttatgggctgcctaaagtgctgccgggagtggggagaccaccattcattccctgggactggtttctttctcggctaaagctagaaggacactgatgtttgcatgtgtggctaatctggagaacatgtagtcacattgttgacacggaagagtaaagctccccagtgtaagttccttaacaaccagaatccccccactctctgcaacattcacgtctcatgaaataacaacagtgtacaatctggtatgttggagagtagagcagaatgtggctatttgtgatggctgtcactccctgaagccaaagctaaaaataaaactggggggagtgacgcatggacagagtgttctagagccatccttggccatcctgttgccatcactgacccagtcctgatggagccttactgtggctgcatctgtgtccttgctgccggcccgggttgtcactgtacagacctcttcagtggggagctgtctgcttgcctgacctaaggaaagccagttgaaagtccagtagttcaaacaaggtgtgagcgaggaagtgagtcacagagtcaaacaaagtcacaagtgcctctcccctttctaatccagctttgagcccgtctccagtcagagaggtatctgctgggcatgggctgaaggacaagcagaccacaggggccatgagcattccggcctccaaggctgggcggtactggcatgggaggctcttttgcaaaccaggataattaaatcctctggggctttaattcttactccagtttgtcttgaaaatccttggtgaaaacccctggggcacgtgcgattctcccagtcctgggcttctccccctccatcacccctattttcttattgaccccatgacggcttttacaaatcataagcaaaaactgcagtcagactctactcagatttcccgcctatgctcctaggacagagctggaagggaaggaggctgggcctatttagtcataatgcctccccatcaggtctagctttcattcatccatgaatcctcacccaagggccaagaactgagttcactgcaccctggacccctgttgaggtaggagaagtagacgttgggagcaaggatcctctcctaattttgttgcatcccctcagtgcccagcacagctccggatacagggcaggttcacagtcagcgtgttcacctgggtctgtgtatgcacctaagaaaagcctcaactctcctccaagaaacagaagaggcaaaacaaacataagaccccccaaacttccaaactcacaagctaaaggctataaaaagactgttttcatttcactgagaaacacttctttgatccaaaacctatttttgtgccttttttggggggaaataattatgcccaaggcctggggcaagctcaagcctgctggaggcagaggtggccccaagggcagggcaggcagagaaaggcccattctggggctggccctgggaggatgtgcagggtttcaaccacctgccatttccccagaagcaagaaagcctctgaggttggagtgaacactgcatgcatctacagtggagacccaatcaccattacagacaaaaagctctagaaactgcaaagttggggttaagttagagtctaggaactgcagtcatgcacagctggcgaccagccaaaggcattttactgagcaatgtttgacttttgtaggtcccccagcaacattgagcacatggatctccctggccagacagggctggggtttaatgtggagctttcaatggatcacagcaaacactctctccaaactccttcctgcatgctggcctcactccactctcaggttcctagaaccaatgccactcttctaggtcctgcagaatccatgggcagggatgcacgggttgtttctgagcaagcagcatctgcgagggcctacctgaaggactctgggagggacacaagggctttcccagagggtaggtccctccatgtgccctgcagcagccacggtaccttttctaccatatgggagtcagtgggctgatgggctggtgataagaaacagggagggggcgtaatggtcacaaaaggaagaaaacacaagaggccgaaggagtcctcactagtgtaaggggtgtgggagaaggcagaggtccctgaaaacaggggaatggattcataaactctcctcaaatccaagagaagcacagcaagccagggatcatgggctcagaggtcagccaggcagaagattctagagtcagctcttgttcttgtcttgagaccaccagagaaattcaaggccggtgggtgtgtggcagaaccagaactggaacccatgtcttctgcccctgagacctgcactctgtgcctcccagagctgctgttcctccagtcgggctgaagaacgaaggctcaggtggcctggaagaaagtgtttcatggtgcccatgtgagaaggcctgggcgtcctaccctgctatctacatctgtaaagaagggccaggcctctgacctcaaggcgtgctgtcctgcaggctctgggcaggcacaaggtcctcctctcaccagtggggcaaggatgagacatgcttatgtgggatcaggaacacagctattcagatccaattgggaggagggtgagtgctcccttggggctcctgtgggaggaaggagctgcttcctctaagaggaggagcttgaatctgcaccagaggcttggaccaaagaactgacctacccatgtgagcatgcccctagctgtgcctcctggtgaccctgccgaagtgtcagcctgttagcccagctcccagaccctgggccgagcatcctctggtcatggccggtggtgctgagcttggggacagggccacacattttggctctctacatactctggattctatacaatcacgctggccacacatgacagacacaaggcacaacacatccattaggacagcaagtccatgtcacactgcacaaattacatatgtcccacggcacagtggatgcacagacagaccagcggagctgaggggcaggtgcctctgtgtctctgtgcttcttggctccagctggcagaacaagggctgtgcactctgcttgcccattttcccagcattcccccagagccccatnnnnnnnnnnnnnnnnnnnnnnnnnnnnnntttgctttcagcatcctgggcaggcctgctggtgctgcttggtcactctgggcattggctgaactttcatgggtataaattgtctatcaagagattattcacaaccaaacttaaggacccactaggctcacctcctgagcacacacagataaaatacaataaatacaactgatcccctaatgtctgccagggcccctggtcagtggccgagcagccgcggctgcaggggagagtggagcgatgatgcgcctggggacacacagcgggggagatggcttctggtggggggcctgcggcagggcaagcagggcgagggtgggcctcattcacatgggcatcgacatcacagtatgggtggcactgtacagcaggagcctcactctggccgcagctactcagaaaacggtggaaacatgcccaggtcggcaaagtcttcgatgttatagttgccagtcccctgggttggatctcctggcatgggcagcatgtcctggaacacttcagtctgactgggctgctggtgggagtgctgctcaccgctctgctggccatggtgctggctttgccactgcgaccagacttccgagggccgcccttggaactgcccgctactttgtccactttcagcgaaccctggagtcctgttggcaagactggagtaggcattcccacttggcgaggaggtagctgggctggagagggggctgtaggaagaggggtctgccgggtaggtgtggctcgttccaatcccaaagggagatgactgagtcttgctggactgagatgggatttgctgtcccggaaagggcggacgactccctgtccatgccacctgactctggtttagctgccgggagatttgggacatgttctggcccgtggaagaagaggactgaatatcattcactccaggcacatgaaccactgaagagctgaaggccttcccggagtgtccagagggaaatgggcttccttgggagtagatctgctgggttcctgctgcagaggctgagctcatcatcttcttctccgatgcactaattcctgcaaacatttcagcaaaccgaggatctctttcctgggagaagattgcatccgccttttccacggacttcccggcctcatgaacaccggctggtaggttggggacggggacctgggataagtcatacgatgacaatccatctctctggtgcacttccaattctgcctgctgttgctgaagttgcttgacgttggtgttggtgcagatgatgtactcaatctcatcagaatagggattctggaatgtgaagctgctggtgcggatcaacatccactcccggttcttggtgcgaaatcgatacatgaccgacaggacttggcctttcagcttaaccacctgctggaagctctcacgcagatggctttgatcctcagggtggcagaattccaaaatgtcctttcccagaagatcctggggttggtagccaatcacactgatacatcttggatccacaaatgtgatgattccatcggagttatgccgggataagaactctgtgggcaccgacatcccattcatgtccatgcatacaggagagctggtcacctggagtctcccaattgccacgaggcaatatttactgccttgtcccacatcagcgtcttcttcaggtatggtcattcctgctggtggccaggccttgatgtatcctgtacagtggaccacagcatattgggcttctccttctttcacagggccaaggccattcctgaaccttttcctcatggtggttattctgtttagaggaaggtggtccaaaggagcatttccacacctcatcctgcagatgaaagaccgccgcgagcccatgcacatcctcatggatgactgctgcccttctttcttgaccgtcccagtcttcaggtccaagatccggcctgtcattgagttttctgaggtgcacagttgctctctcagcttctccacgtcatcaggatgcacctgttcatacagtgtgctcccaaaccactctgactggggctggttcagaacaggggtgacggagtcagacacataaatcactcgccctgtctcagcagccaccacaaacagaaatccatcagctgcttcaaggatgagatgcttcagttcctgctctgtgaggaaggaaggcttgtacgcgccatcggtggacttgttccctgtacccctcatggacttcatgtgcgagacggccatgcggaggatggtgagcttgtctggcttccgagccagtgcgctgcatgtggggaccatgtcggagagctccgtgatgtactgagtcatcttgttccgtttgcgcctttcgatttcactatgattctctcttgaaaatttactggggccttcaccatcttcatcatcgaagtccattccggaacgccgctttcctccacgggcaggcatggcccccgccatcctcacctgtccggtggccgccatgggggcaacgggcaacgtcacagatccaggtatgtctgaagccatttctggacttctcctgggaatgaatgaaggtcacagcagtccaggtgagagatgacaaggcctgcgggaggggcggcgcggagcccggcgctcagccccggggacccggtcaggcccaggcgccgccgccgccacacaaaggacggcgcgggcgggcggcgctccctccgctctccccgccgccgcggccgc

SEQ ID NO: 7302 - DNA, 2302 bp, Homo sapiens
  misc_feature (953)..(970): n is a, c, g, or t
  misc_feature (1570)..(1646): n is a, c, g, or t
tttttttttttttttttgaagttattcctaacattgacccaaacatgcatcccccatttgggcatagctttagcttacaccttgcttacagcctgggtgtatcttcagagaccagaattttattgatatataaagaaaagatctgccaaccgaaaacctttgtagctgcttcctgtttgagcagcatggttttctaaaatgcatcttggaggggctgtcaatagggcagcatttctgctgcagacgctgagcccctggtcctaggtgccagagttccccaggtccctgtctccacctggttttctttccagtctcagcagtgttcagactttcccagcagatatttttctttgttggtgacttttccataccatggaatgattagcaaatgcatttctgctgtctttgaaggatgctattccaaaacaggatcaggaagaacccttagtttcctttcagaataaacaagaagctagaaaggggtttctaagaggccactcctctgaatcgagatgaagcctaggttgggggtgctaagagtatgggttaccttcccccttttactcaacttttccttttaacgtggctatggccacccctggcttaatgctaaaactcataggacaaaatgtacttaaaaaaaaaaaaaaaaaggaaaaaaagaaaagcagttgccaaccgaggcattttctgactcgtcagaaatgtgtgtgcgtgccagctgccctgtgctcagccaccttaggagacccattgctctgtcgccatagtcttcatgtcccgtgttccagatacccctctcattcctatgatctggaaacttccacgtcatgagggtgggaggggtgaggaaggtaccagaatgctcctagccaatcagggcttctagcttgccacacaaggtttctagtttcatttgacatttgtggacattttaacaagattctgttttnnnnnnnnnnnnnnnnnnttcccatcttttcactctgccctaatatagcatggaatgctgcttggtgctgttcccttgtcttcctggttgttctccctgcttctttctttctccctttcctttcctctctctgtttttctctgttgctttctcagttttgcttatgccctccccctccccacctcctttccttctcccatttttaaaatgcatggacatcttagttttttgagcatgttttgatctgcaggctaaggtggtttaaaactctgagaggcttaattatttatcttggtttctgggatggaagcagaacccatagtctatttactctctcccagggagaaaaaggaaccttgccaaattgagggtgagagggggtggtgcttgctcccctagagttccttctgacccagaaggaacagacagaccctgaggccactagcccccatgaatctcagcctctgggaggcagggaggactgagcatgctcccttacacccctcccctccttccctgccttcctgccatcttgctgagtccaaaccccaagcacagaggggcatgatcagacagctctggggcacagactgagaggaggaactcagcacacccttnnnnnnnnnnnnnnnnnnnnnnnnnnnnnnnnnnnnnnnnnnnnnnnnnnnnnnnnnnnnnnnnnnnnnnnnnnnnnaagctggccagtgcttacacacgtgtttccagttggggtgttatcagccatggttctgacaatattctagggtccttagatgagcacacttcctgtatctgcattatttttatagcattagtggggttgatccccaggctcacctttccttaccaaataccatcccatcagactgggattaatgggaggagaagctttgaagtcacatgctcaatttcttgagttgattttccccgacctcatcctttgatgctaagcaagaagggctctgaaattctcattcctatttcttacatgaatgagtagtgaagaggggagatgctggttttggtgcagggcaaaattagtctttctggtttaaacacgaatcacgataacccaaacccaggaaggtccatgctgcgattccctggcacttcttctttgtagtcacttcggtgaccggcttgtgctgcaccctccattgactagccttggcatattgacaagagcaggatgcccctccatccatcccatcctcaccatctctccttccaaccttctcactacggggtgggggaggggaaagccccaaatcttatttttgtttcgttttttgttttttgtttttgttttaagtttattttgttttatttttgtttcccttcctcccttct

SEQ ID NO: 7303 - DNA, 2028 bp, Homo sapiens
cccgagcggctcaggtgtcctgtcgtgctcacctgcgccggtcgctggaccgcggggcgctaaccctggagagcccaggagcgggcgggacatggactgcgtgatctttgaggaagtggctgtgaacttcaccccagaagagtgggcattgctggatcatgctcagaggagcctctacagagatgtgatgctggagacctgcaggaaccttgcctccttggattgttacatttatgttagaaccagtggatcaagttctcagagggacgtttttgggaatggaatatccaatgatgaagaaattgtaaagttcacaggaagtgattcctggtctatttttggagaaaattggagatttgataacactggagatcagcaccaaatccacagaggcatctgagaagtcagctggggagactctgtgaaagtaatgaaggtcatcaatgcggagagaccttgagccagactgcgaaccttcttgtgcacaagagttaccctaccgaagctaaaccctctgagtgcactaagtgtggcaaagccttcgagaatcggcagagatctcacactggacagagaccgtgtaaggaatgtgggcaagcctgcagctgcctctcctgccaaagccctcctatgaaaacgcagactgtagagaaaccctgtaattgccaggactcaaggacagcatctgtgagatacgtgaaaagtctcagcagtaaaaagtcttatgaatgtcagaaatgtggaaaagctttcatttgtccctcatctttcaggggacatgtgaatagtcatcatgggcagaaaacccatgcatgtaaagtatgtgggaagacctttatgtattactcctaccttacacggcacgtaagaactcacacaggagagaaaccctatgagtgtaaggagtgtgggaaagccttcagctgtccctcgtactttcgagaacatgtcagaacacacactggagagaaaccgtatgaatgtaagcattgtggaaaatcattcagctgttactcctcctttagagatcacgtgaggacgcacactggagagaaaccctgtcagtgtaaacattgcggaaaagcgttcacttgttactcgtctcttcgagaacatgggagaacgcacagtggagagaaaccctatgaatgtaaggaatgcggcaaagccttcaggtacccctcctctctgcgagcacacatgagaatgcacaccggagagaagccctatgtgtgcaagcagtgtgggaaggccttcggatgtcccacttactttagaagacatgtgaaaacacacagcggggtgaagccctatcaatgtaaagagtgtgggaaagcctacagtttttcctcctcccttcgaatccacgtgaggacgcatactggagagaagccctttgagtgtaagcattgtgggaaagccttcagctgtcactcctcccttcgagagcatgtgcgaacccacagcggagagaaaccgtacgaatgtaatcaatgtgggaaagccttcagccacgctcagtactttcaaaagcatgtgagatcacacagtggggtcaaaccctacgaatgtactgaatgtgggaaagcctacagttgttcctcgtcccttcgtgtgcacgtgagaacgcacactggagagagaccgtatgaatgcaagcagtgtgggaaaaccttcaggtatctcgcatcgcttcaagcacatgtgagaacacatgctggagcgtgaatctacaaatacagtggacctgggagagtgttcaaccgtaaaaccttgttgtaaatgtgagaaacgttatttatgtagagcatgtaggaaaacctggtatagcacttattttgtacctaaaaattcagagtaggagagaaatctcttaattatgattaatatggtattgcctttacatgcctcagccttaatagtgattccttttgtattaatttctagtgtatgtttgtgatataaacatttaataaatatcctgttttgtacgctttccaaaaaaaaaaaaaaaaaaaaaaaaaaaaa

SEQ ID NO: 7304 - DNA, 664 bp, Homo sapiens
ttttttgtaattattactttttattaatttagagcatttgaagtataaaaataaaaggcttttgacatactgtatatacatacatagccttctgttgtacatcctttccaacgtgttttttaaaatttatatttcagtccaatattcaataaaagggtcattaaaaacaaaacaaaattgtgaaaaaaaagaaataagaatgtgtctctgttgcacaactgcattctatccttgcaggtaatattcttacatccaatgagagcgctgcctgcatagaggtcatgaaattgaacctttaacctctccatgtggatcagatagaaaaggatttctgaagagtgcatttgccagtttaaaagcaacacttttaccatctatgagatagaggaaatatgtcaacattaaccaataataatctttaaaagttaaccctttaatccatcctattttccttctcgtattttaaaaagtggctttaaatcataattttctttgaatagcaaattgtatctgatatcttttaaaaattactccatgtgaattcactgttaagacctagagggagaaaaggaaacttcaataccattaatattagattttttaaaatacaagaaccagaaaaaaattataaatagcacaataacaagagatttcttaatttaga

SEQ ID NO: 7305 - DNA, 5931 bp, Homo sapiens
  misc_feature (5876)..(5876): n is a, c, g, or t
gtacggctgcgagaagacgacagaaggggattcatgtgacgggcccctctgcttctcccccgccccatcatctccagcgcgtggtgggggaactgctggggaaggcgattggcatcgatctctccatcccttccgaggcccgacttcggaattgtcttagaagaaagaaggcaagccaccattttacccacgtaaatatatgaatatatttctgacattgaggtgttccagaagatgataaagaaatgatagcagctccagaaataccaactgattttaatctactacaggagtcagaaacacatttttcttctgacacagattttgaagatatcgaaggaaaaaaccaaaagcaaggcaaaggcaaaacttgtaaaaaaggcaaaaagggcccagcagaaaagggcaaaggtggaaatggaggaggaaaacctccttctggtccaaaccgaatgaatggtcatcaccaacagaatggagtggaaaacatgatgttgtttgaagttgttaaaatgggcaagagtgctatgcagtcggtggtagatgattggatagaatcatacaagcatgaccgagatatagcacttcttgaccttatcaacttttttattcagtgttcaggctgtaaaggagttgtcacagcagaaatgtttagacatatgcagaactctgagataattcgaaaaatgactgaagaattcgatgaggatagtggagattatccacttaccatggctggtcctcagtggaagaagttcaaatccagtttttgtgaattcattggcgtgttagtacggcaatgtcaatatagtatcatatatgatgagtatatgatggatacagtcatttcacttcttacaggattgtctgactcacaagtcagagcatttcgacatacaagcaccctggcagctatgaagttgatgacagctttggtgaatgtggcactaaatcttagcattaatatggataatacacaaagacaatatgaagcagaacggaataaaatgattggaaaacgagccaatgagaggctagaactcctgctacaaaagcggaaagagcttcaggaaaatcaagatgaaatagaaaatatgatgaatgcaatatttaaaggagtgtttgtacatagataccgtgatgcgatagctgaaattcgagctatttgcattgaagagattggcatttggatgaagatgtatagtgatgcctttcttaatgacagttatttaaaatatgttggttggactatgcatgataagcaaggtgaagtaagactcaaatgtcttactgctctacaagggctttattataacaaagagcttaattccaaactggaactttttaccagtcggttcaaggatagaattgtgtctatgacccttgacaaagaatatgatgttgcagtacaagcaataaaattactcactcttgttttacagagtagtgaagaagttctcactgcagaagattgtgaaaatgtctatcatctggtttattcagctcaccggccagtagcagtagcagctggagaatttctctacaaaaagctcttcagtcgtagagatccagaggaggatggaatgatgaaaagaagaggaagacaaggtccaaatgccaaccttgttaagacattggtttttttctttctagaaagtgagttacatgagcatgcagcataccttgtggatagcatgtgggactgtgctactgagctgctgaaagactgggaatgtatgaatagcttgttactggaagagccacttagtggagaggaagcactaacagataggcaagagagtgctctgattgaaataatgctttgtaccattagacaagcggctgaatgtcatcctcccgtgggaagagggacaggaaaaagggtgcttacagcaaaggagaagaagacacagttggatgataggacaaaaatcactgagctttttgccgtggcccttcctcagttattagcaaaatactctgtagatgcagaaaaggtgactaacttgttgcagttgcctcagtactttgatttggaaatatataccactggacgattagaaaagcatttggatgccttattgcgacagatccggaatattgtagagaagcacacagatacagatgttttggaagcatgttctaaaacttaccatgcactctgtaatgaagagttcacaatcttcaacagagtagatatttcaagaagtcaactgatagatgaattggcagataaatttaaccggcttcttgaagattttctgcaagagggtgaagaacctgatgaagatgatgcatatcaggtattgtcaacattgaagaggatcactgcttttcataatgcccatgacctttcaaagtgggatttatttgcttgtaattacaaactcttgaaaactggaatcgaaaatggagacatgcctgagcagattgttattcacgcactgcagtgtactcactatgtaatcctttggcaacttgctaagataactgaaagcagctctacaaaggaggacttgctgcgtttaaagaaacaaatgagagtattttgtcagatatgtcaacattacctgaccaacgtgaatactactgttaaggaacaggccttcactattctgtgtgatattttgatgatcttcagccatcagattatgtcaggagggcgtgacatgttagagccattagtgtatacccctgattcttcattgcagtctgagttgctcagctttattttggatcatgtcttcattgaacaggatgatgataataatagtgcagatggtcagcaagaggatgaagccagtaaaattgaagctctgcacaagagaagaaatttacttgcagcattttgtaagctaattgtatatactgtggtggagatgaatacagctgcagatatcttcaaacagtatatgaagtattataatgactatggagatatcatcaaagaaacaatgagtaaaacaaggcagatagacaaaattcagtgtgctaagacccttattctcagtctgcaacagctttttaatgaaatgatacaagaaaatggctataattttgatagatcatcctctacatttagtggcataaaagaacttgctcgacgttttgctttaacttttggacttgatcagttgaaaacaagagaagccattgccatgctacacaaagatggcatagaatttgcttttaaagagcctaatccgcaaggggagagccatccacctttaaatttggcatttcttgatattctgagtgaattttcttctaaactacttcgacaagacaaaagaacagtgtatgtttacttggaaaagttcatgacctttcagatgtcactccgaagagaggatgtgtggcttccactgatgtcttaccgaaattctttgctagctggtggtgatgatgacaccatgtcagtcattagtggaatcagcagccgggggtcaacagtacggagtaaaaaatcaaaaccatctacaggaaaacggaaagtggttgagggcatgcagctttcactcactgaagaaagtagtagtagtgacagtatgtggttaagcagagaacaaacactgcacacccctgttatgatgcagacaccacaactcacctccactattatgagagagcccaaaagattacggcctgaggatagcttcatgagtgtttatccaatgcagactgaacatcatcaaacacctcttgattataatcggcgtggcacaagcctaatggaagatgatgaagagccaattgtggaagatgttatgatgtcctcagaagggaggattgaggatcttaatgagggaatggattttgacaccatggatatagatttgccaccatcaaagaacagacgagagagaacagaactgaagcctgatttctttgatccagcttcaattatggatgaatcagttcttggagtgtcaatgttttaataccagtacacaattaaatctgtggtgaagtcattttctaagtggaagaggaaattttaaagtgtggtagatacagtgaaattctgtacagatttttctctaaggagaatatgacatgcttatgcttaccaagatcaagtgcattgaggggcagttttgtttgcctgaataaacgtaaaggacaagtaaacaatttgatgataagctacagtttttcttagaaagtaaatattttatttatgcgctgttagttggcttttgaatcgattatttcatgcttttttttaaaaaaaaaaaaaaacaaaataacaatctgaagaggcatttggtacagatatgaattctcttacatttatttactggttgtactaaataatgatgacctctgctggatttctgtttacatccagaaaacaatgttaaggatgtatttattcccctaccctgaagaaagtgtaggatagaattgtttttagcattctaaatttaaatgcttaaaacgtcaatcaacaaaactttgttttaaatattgtaattgtggagaaaagtaaacttataagcagaacttttacaattttttcatctaaaagtattttaagatatttttaaaatccaagagcttctctatacttttcagaaatatccagatgcagtgaactgccagaaggtaaccagtctcaaacatgcttatcccattatcaaccctgaaagtttgcttgtcctttaagataaaaatgtaatgttgtgatattccttccagtaatgccactgtattttgtctccaaataaaagaagcttattgtagtatgtttgcagaaaaattctaaacaaaaattatacagcttattagagtgtgggaatagggatctaaattttaaataaaattatatatatatataaattggtgctgattttataattgcgcagtttgtttagttttttcttacttttaaattccaacttaaaattatgaggtttcagaaatatattgaaagtttaacaatgtttaaaaatagaaaagcatgagtgttcatgctttaaaatgatttttaaatttgtattttatattgttttatctatctgtctttgcaagcagtcttcaggttaaagatacttctaacaggttacagtacatttcctctgtatgtaaattagatgggataatagaattcataacccataatattctttgaaagctaagctttaaacttcattttatgtcctttcacaaataaattagtttaaaacagaaagtggctacttgccattttgacatcaactcattttgcgaggcttaggcagctagacatcgtttaaaacaaaatattaacttatattacatgtgtatctatctattgtcagtcgtctctcagttcttgaggtatattattttaatcattccatgccttaatatgcttgcaatacaagaatatcttcagatgggtgaataccaaaaggctttcagtttttagtcagaaatcaagcattgggctgtggtagccaaaaaccataggttagctaaaaagatcatgatacaattattttattaagtcatggttaataacaaatgaatccagacttgtctaacagattttccatcaacaaatattgttatgtgcaaaagtattgcctatgttgttttacacaccactgcattaactagaactgctgagaggactgtatatatgattttaaacctaagttgattttttttctcactcttgaaaggagtacttctttgtgaaagcagttcttacagctttgttttcaaccagctaaaaatgttttatatattactctaacctgttgtcctccacattctattgtcctaattgtactgttttctgatttgtatttatgtcttgagacagtaactttttgaataaaaataaacctacagaaaaaaaaaaaaaaaaaaaaaaaatagaaaaaaanagggggcgggccgcctcctaaaggattccctccgagggggcccaagcttaacccg

SEQ ID NO: 7306 - DNA, 465 bp, Homo sapiens
ttttttttttttttttttttttttaaatttaaaggagtttaattgagcaacaaaccatttgtgaatcgggcagcctctagaatcatagcagattcacagagactccaggggtgcctcgtggttagaacaaatttatagacaaaaaaggtaaagtgacatacaggaattggaagtgaggtacagaaacagtgagattggttatagcttggcatttgccttatttgaatgcagtttgaacattcagcagtctatgagtggttgaagtatgtccgctgggattggccaaaactcagctgttgttatatgtgcatactattgagttaggttttaaattttgtctgactattaagctaggttacagttcatctatgaggacttatatatataggtgaaggagtcctttcttaggccatatttagttttgctttaaaaattccccccttttggtaattttttgaattttga

SEQ ID NO: 7307 - DNA, 845 bp, Homo sapiens
cgaagcttatctccttccccaaattgttgataatgaaggcgagaagagatatagctacaggtaaactagattgaatctgctgtttatgtgttggaagatgacgtttgaagatgagttttagttcttagcaccaatacaacaaatgatgggatttgaggtttaagtgcctaagtttaaggctctcatataataactcttaatttctttttgtgtcgggaaaagaacaaactcttgccttgaattaaccagttattttaaaaaatcatagacttctgtcattagaggaaacggcctgaactccattaccaggtgactttttagctttagtgggtggcacatgggactgtctgtggtgtgccatctgcagtgcgcaagccatttgtttctggaaacagtctcacaagcaatgattctggtgagtttagaaatgaatcaggatgtgctaagctcaatgaggactcattagccttggataatgtgattctataaatgaacagaatggagacggtgaagactcaggagtatagagaaaataggatgacactggaagctaggctgattggtgggagttttggaatcaatgtgcttcaactattagttgattaagcatatagttgaattagtaaagagtgggagacttgccccttgactgtgtgttatttaccacaaacacacaaacaaccacaaaggccactacacacccgacgggcgaaaccagcacgccatgcaactgcgacatgggccttccgcgcttcctgacccaagcttcctgaacccaagtggtaacttcgccggttccctattgtgactcagaataatttcaaaaacccggtcaccctgttata

SEQ ID NO: 7308 - DNA, 2085 bp, Homo sapiens
gcagtcactgccgaccggctggctgggccttgcggcgtgaggaccccggcggcgccgcagtcccgcgagccatggcccagtccggcggggaggctcggcccgggcccaagacggcggtgcagatccgcgtcgccatccaggaggccgaggacgtggacgagttggaggacgaggaggagggggcggagactcggggcgccggggacccggcccggtacctcagccccggctggggcagcgcgagcgaggaggagccgagccgcgggcacagtggcaccactgcaagtggaggtgagaacgagcgtgaggacctggagcaggagtggaagcccccggatgaggagttgatcaagaaactggtggatcagatcgaattctacttttctgatgaaaacctggagaaggacgcctttttgctaaaacacgtgaggaggaacaagctgggatatgtgagcgttaagctactcacatccttcaaaaaggtgaaacatcttacacgggactggagaaccacagcacatgctttgaagtattcagtggtccttgagttgaatgaggaccaccggaaggtgaggaggaccacccccgtcccactgttccccaacgagaacctccccagcaagatgctcctggtctatgatctctacttgtctcctaagctgtgggctctggccaccccccagaagaatggaagggtgcaagagaaggtgatggaacacctgctcaagctttttgggacttttggagtcatctcatcagtgcggatcctcaaacctgggagagagctgccccctgacatccggaggatcagcagccgctacagccaagtggggacccaggagtgcgccatcgtggagttcgaggaggtggaagcagccatcaaagcccatgagttcatgatcacagaatctcagggcaaagagaacatgaaagctgtcctgattggtatgaagccacccaaaaagaaacctgccaaagacaaaaatcatgacgaggagcccactgcgagcatccacctgaacaagtccctgaacaagagagtcgaggagcttcagtacatgggtgatgagtcttctgccaacagctcctctgaccccgagagcaaccccacatcccctatggcgggccgacggcacgcggccaccaacaagctcagcccgtctggccaccagaatctctttctgagtccaaatgcctccccgtgcacaagtccttggagcagccccttggcccaacgcaaaggcgtttccagaaagtccccactggcggaggaaggtagactgaactgcagcaccagccctgagatcttccgcaagtgtatggattattcctctgacagcagcgtcactccctctggcagcccctgggtccggaggcgtcgccaagccgagatggggacccaggagaaaagccccggtacgagtcccctgctctcccggaagatgcagactgcagatgggctacccgtaggggtgctgaggttgcccaggggtcctgacaacaccagaggatttcatggccatgagaggagcagggcctgtgtataaataccttctatttttaatacaagctccactgaaaaccaccttcgttttcaaggttctgacaaacacctggcatgacagaatggaattcgttcccctttgagagattttttattcatgtagacctcttaatttatctatctgtaatatacataaatcggtacgccatggtttgaagaccaccttctagttcaggactcctgttcttcccagcatggccactattttgatgatggctgatgtgtgtgagtgtgatggccctgaagggctgtaggacggaggttccctgggggaagtctgttctttggtatggaatttttctctcttctttggtatggaatttttcccttcagtgactgagctgtcctcgataggccatgcaagggcttcctgagagttcaggaaagttctcttgtgcaacagcaagtagctaagcctatagcatggtgtcttgtaggaccaaatcgatgttacctgtcaagtaaataaataataaaacacccaaaaaaaaaaaaaaaaaaaaagaggttataaaaaaagg

SEQ ID NO: 7309 - DNA, 1814 bp, Homo sapiens
  misc_feature (1687)..(1812): n is a, c, g, or t
agactgtccattgcatggctgtggagtgagactgcccttagcctgggtcagccttcctgggccataaattgggcatccgtgatgctaggtaactgtgggaacaaaatgacagcttagagcagccatgggtgatgtttggtggtaaaaaacctacaggcgtttggggtcccatgattgttccagaccatgactcttcctggttgtgggtttgttacagagcaggagaagcagaggttatgacagttatgcagactttccccctcctttttctcttttctcttccccttgcttttccactgtttcttcctgctgccacctgggccttgaattcctgggctgtgaagacatgtagcagctgcagggtttaccacacgtgggagggcagcccagtactgtccctctgccttccccactttgagaatatggcagcccctttcattcctggcttggggtaggggagaccattgaagtagaagcctcaaagcagacttttccctttactgtgtgtactccaggacgaagaaggaagatcatgcttgatacttagattggttttcccagggaagagggcggagcagagcaaagtcactgtgaaccctgggccaggccctggctgggccagctcctgagagcgtctcgtgttgcagacccttgcccacttcacccacctgcaccttctccccctctcacagtgtcactgctgctaatggtcaaagtcaaatgtgtggccacatgggatgggccaggtcctctcaggctactttctggatgtcatttttaaaatatggaaacatgcaggtgccttcccaaagaggcttggactggtatatccaacgagaaacaaataagctaaagaaagtttaaactcaagaagaaagatgttgacagtctatgtaacagctggaaagtttataggcacccacctttgggacaacccagtgattatgaacatgtgatatctactatttaaaagaaatgttctcaccttgggttgattgtggtataccatgtgttatgaaaattgttgagctgaagctttgaatcgatttagttgagtctgactcacttgctttggttcctgtgtattttactacccctcttgtcagtgaccttccttccccaccccacccagagtgaatttgtagcatgattgtataaacctctatgtagaaaatggagatttcttgctctgaaatgttaagctctaactgatccatttctgtgtcctttagcctagtatgtctgaacttccattcttgttatatatttaaactttccctctatattataggttttgtggcatccacggtcaggtgtagaggaagctgccccttgcagaactgtactgtaatatttttcttttataaatattttcacaggactgattgtacacagggcttgtaataaaattttaacactgtgctgtgaaacaactatggggaatctccattgaaggctacttcatgggcacctgaaagtggagtgttatagctatgactttctatttcttgtttcctaagtaaattaaacctaattttcaccctttcattctgtttcagcctcctgtataagaagtaccgtattttctgcccatcatactttgtaataaaacttgaacatgtaaaaaaaaaaaaaaaaaaaaaaaaaaaaaaaaaaaaaaaaaaaaaagaaaaaaaaaaaaaaaaannnnnnnnnnnnnnnnnnnnnnnnnnnnnnnnnnnnnnnnnnnnnnnnnnnnnnnnnnnnnnnnnnnnnnnnnnnnnnnnnnnnnnnnnnnnnnnnnnnnnnnnnnnnnnnnnnnnnnnnnnnnnncg

SEQ ID NO: 7310 - DNA, 999 bp, Homo sapiens
  misc_feature (12)..(12): n is a, c, g, or t
  misc_feature (81)..(81): n is a, c, g, or t
  misc_feature (98)..(98): n is a, c, g, or t
  misc_feature (101)..(101): n is a, c, g, or t
  misc_feature (103)..(103): n is a, c, g, or t
  misc_feature (123)..(123): n is a, c, g, or t
  misc_feature (136)..(136): n is a, c, g, or t
  misc_feature (154)..(154): n is a, c, g, or t
  misc_feature (169)..(169): n is a, c, g, or t
  misc_feature (172)..(172): n is a, c, g, or t
  misc_feature (179)..(179): n is a, c, g, or t
  misc_feature (200)..(200): n is a, c, g, or t
  misc_feature (209)..(209): n is a, c, g, or t
  misc_feature (229)..(229): n is a, c, g, or t
  misc_feature (233)..(233): n is a, c, g, or t
  misc_feature (238)..(238): n is a, c, g, or t
accataacccangcattcatcttcatcaacacccggaggaaggtgaactggctcaccgagaagaggcaggctcgagatttnactgtatcccccatgcntgnanatatggcccaaaaaggaacnaaacgtgattatnaggaagtttcgctctggntctagcagagttttnatnacaactnaccggctggccagaggcattnatgtgcagnaggtttctttattcatcaantatnacctncccaccaacagggaaaactatatccacagaatcggtcgaggtggacggtttggccgtaaaggtgtggctattaacatggtaacagaagaagacaagaggactcttcgagacattgagaccttctacaacacctccattgaggaaatgcccctcaatgttgctgacctcatctgaggggctgtcctgccacccagccccagccagggctcaatctctgggggctgaggagcagcaggaggggggagggaagggagccaagggatggacatcttgtcattttttttctttgaataaatgtcactttttgaggcaaaagaaggaaccgtgaacattttagacacccttttctttggggtaggctcttgccccaggcgccggctcttctcccaaaaaaaaaaaaaaaaacactaatccatttccctaacctagtaacctccagatcccagaggctctcctcacctcagctgagctcctttgaaagtgattcaagggactatgtcactcagcctcatttgctggaccaaatctggagggagaacccctaaaacccctaagtgaggttgcccagggggttgtccccaggtggggggaagcaggggagagaaaatggtagccatttttacattgttttgtatagtatttattgattcaggaaacaaacacaaaattctgaataaaatgacttggaaactgccaaaaaaaaaaaaaaaaaaaaaaaaaaacgaggcgccgctcccttcgtgccaaaaaaaaaaaaaaaa

SEQ ID NO: 7311 - DNA, 1124 bp, Homo sapiens
  misc_feature (13)..(14): n is a, c, g, or t
  misc_feature (27)..(27): n is a, c, g, or t
  misc_feature (31)..(31): n is a, c, g, or t
gcagacacctaanntatacgtcgaagntgtntaaaaagttgttttttttttttaatggaaaatatccaagaagcagcccaggagtatctgacatggtggaatggaatcagttagaaagcgaagaaatcactaaaaaaagttacttctttttttccccaccagttataatcttcaaccttactagtttataacagtttaatgtcctatagaaggatcctccactaaagttataattttaagtatagtcatatagagagatccctaatcccctgggtaatctagatactaaaggtggggaagaacagtcatattgacattctttaatccaaaaccactgtttgaaattagtaaggatattttcagcattcccaaaaacatgttattagcacgttgagctgaaaacgtttttcttcctcagtgagtacagaaaccaaagcagtctgcgtgtatgtctatgtatagactgtatcgtacctgggctcatggagtagtctaaatttaaaacgtcctctcttctacctccaatgaaaatgtttccgtgtgtggcgtctgatcttccaccgtgtgtgtggtcgtctgctggtgtagcgctgtttaaggagcgctgtgtgctgctagtgttccacgatgtgtgtggtcgtctgctggtgtagtagcactgtttgaggagcactgtgcgccgctagtgtgggtttacacttatgagtgttgtcattacatgtgttctgctcttctctccctctcctgcccctgccctgctccatcagagagagctgcaggtctctgctgccgcctagtagttccctgtcacaaagggatgccaaggcttaccgatctgtctgtcaaaaccaaagatgtctgggaaatccctcgagaatccctgcagttgatcaagagactgggaaatgggcagtttggggaagtatggatgggtatgctgagactcaattactctcttattagcttccccgtttggaagatcccaaacaccaaagatggaaggtgaaaataaagactgcgtgaccgggaagaaagtttgaattactaatagtggggaataataatttcagttttggttttaacattctggaattcctaaaaaaaaaaaaaaaagggcggccgct

SEQ ID NO: 7312 - DNA, 1088 bp, Homo sapiens
attttttttttttttttttaattacagaatctgtaagaggggaaaaaaaaagatgattctcttcagagccaaagagtctccaggaatgcattattttaaaatgcatgatggatatgatggactacataatttcctagtttgcttccacatcaataaaacaattttctaaaaagactattggtttattttacacatacactatcaagcgaaatacggtatcttgttcacttgtctggctcattgctgactgttttccttaaaagctgggaaggctgtgggtcaattcagctcgccacctgtttctgtactgcccacaagctgagaatgaattttgtacttttaaatggttggggggaggggagaatattttctgacacaagatatatgacattcacacttgagtgtcaaagtttttaggaacacagccacgcccatttgtttacactttactccttccactttacaatgaagaggtatgaggagctgctacagaaaccttctggcttgcaaagtttaaaatattttttacctggccctttaccaaaaaaaagttttccctgcttaaaaacacattctgatagtgaaagagctttgcatttagaaagcagtctttcccagaaaaaatggaaacttggttggcatttgggattaaagctagataggagtatttgaaaagatcagtttaatcccattccccttttctttactgattttctagctaaaatccttaactttccgtaaccagttcagcatgttgaagatcaactctaataaagattataaaaatagataatatctaccagctgctctctcctctctccacccccaggacttaaactgtggagctcagatacttgaattctggagattcctaggttcaaatctcagctcttcccccttaatagctttggaaacactgggtgagttatcctctcctgtttcatctgtaaaatggtgagagcagcagccacctctgagttatgagaaattaagtggagatactgtattctgagaacggtgcctagcacacagtgaatgctcataaaggtcagtaaaactagattatcttcttcaacattccccatccc

SEQ ID NO: 7313 - DNA, 713 bp, Homo sapiens
tattttgatttggagggggggccataggaagacactgcttttataatacaaaaaatgataaatgaataacacaatcaatgaaaacagatgtaaacaattttttttttttgccatctcccttttttatttgtttctttttaaatgtctaatcaatgtctacccattcatggttgttctgcttgttaggtgatgtttttgtagtatttcaagtatgggaacttgtcaaaagtaatgtttccaatcatcagttcacattcttacaatatgtgttcaccaagtaaagagctgaggtgaatgaaggctgtgaggtcacaaaggaaaccaaggctgctagtcgctacaggtaacttaccctatgacacaaattaacattttgattcagttaggtccattttgggatcaaaatttataactgggtaaagattcagagaccatctctgtttgtaaatagtattttgtaagcttttttgtgtgtgtataaaatactttgcaaacattttccatgttattaaatattcttctacataattgttcttggtagccttaccttttgcaaatgcactgcatgaatgtcgcataaattgtacaaccaattccctatattttacatttaggttgcttccaactatttttttttttttttttttgagacagagtctcgctctgtcgcccaggctggagtgcagtggcgcttctgatgttggagcggccgc

SEQ ID NO: 7314 - DNA, 1905 bp, Homo sapiens
  misc_feature (1413)..(1430): n is a, c, g, or t
ggtggccaggcgcgcggggaggtgtatcagtcagtcacagctgctgtttcggcgcggggccgggccgctgccgcgacgtgtggaggcaggagagcgatgattgccgcaggagaagtgcgggcgcccttcacctggggcccctcccgaaccgcccccgggcccatgcccctccagggcccaggagcgagccagcgggagggcgagggcgagcgctcctggcgaggacagattaaggcgaacccccagtcagcggacatttgagcggctcctcgccgcgtctctgcccccactccaaaccggactcgacgcctgtcccgggccgtgacgcacgcaccggaggaaaaagtgcttctcggctcgctccctctttggggaagagagctcactccccatgcgggcgcgggacactccatctctgttcctgccggtcgggtccgcaaacaccggggatcccagctgcggcgcccaaagggttaacgcaggcgttcggccagtgcaaaccggcctcgcaggatccgcgcttaaaatccgggtgttttcattttgggtttgtttcttctactatgccaagctggtggctctcttttaattctcttgtaacatctcaaccctgcacccatctttcctgaggggaaaaggaaacgggataacttgcggtatttcgatgctcaaaggtaaccggcggctctgctccaaccttcaagagattttgcaagttgaaaaaaaaaaaaaaccatccttcgtaacatctacttaaaaaacgcgacaggttttcccattcttgtacacgcatatacacagtaaagatgtgtatcttacctaagataccgcgcttcatcttcatctaatctttatttgaactcaccgtcgccactggcccagagaccttgtcagtgttattttcagtatcagttaatcagaacaaaaagataagttctgcaatcttctttctcttaattccagaactggaaaattaatatttatatagcctcctcaaaagcatacaggcaataggaagtatggtattatgttcacgatctgatgatagcatttgttttaaaatattttaaaagattagacacaaaatgtgtaaaagacgtttaaaagtgaataaatataaatcaatgctgttgcaaataatttttttatcagtttatgtatctcactaggcttgacattaccagccttctgagctgtgcccttgatgtgtaagataaacgaacattgaacagaatgatagcatctttcctctcttcagtcactgatggagaattggttaatgtggtacaataaatagcccttcctgacactatttcaaatctttttaacagaagaataacctaaatttcacctaataaatttcaatattatttccccctaaaatatctttcaaaacgactcagagacatttannnnnnnnnnnnnnnnnnccaacttttcctccaaggaagttacaatacaatgttgaattatgtattctactttaatcaagaatttgacattaaagtaatatgtgaatcattgctatagtacactagcaaaatgggtaataaactagaatctgttcactttgtgggtttgttccagttccagattataaaatgaatgctcttaaagtgttgtggtcatgaaacaattattgagcatctttatttaagaacacgattcaattaaattttcatttatatcgataaatctataaatgaaacatacggaatatatatattcatgtatatccataaatgaaaacgtgtgtgtgtgtgtatcccggaacatatttgtatgcattttaatgaaatgtgagtcatatgcaatgacaaacttttactgtcatagtcaagaaaattgtactgtagtttggtttttatatttttattcttcaaataggaaataaagggtgaaagc

SEQ ID NO: 7315 - DNA, 1528 bp, Homo sapiens
  misc_feature (2)..(2): n is a, c, g, or t
  misc_feature (943)..(964): n is a, c, g, or t
anttcggcacagggcatttgtctctccttaagtgccaatcacaattggatatggaaggactgtgatttctgcaatgaacccaaacttttagagtaaaaagccaaatttaaattataagaaagaagggaaaaaagagaaaaactcaagtctattacttgtagagtccaattcttagcaatggaatcgctctaggattctagtttgggctttgtctggatttgcttttctcagttgtgctttgaagtgaataagctttgttacaaattaattttttattagttccaatattagttggagttaacttgaattgattgtatgtagcacagcacttttgcagtaagattggtgtgaaatactaaacactatggattttgtaggtgtcaggttaaatggtcaagggatacctacattaagtcatatattaggtattgatgatcttacttcttttctgttcccctgtacaaaacacttacctaacccagcttgtggttttaggacagccaaagctcactgttgttggttagtcctaatcactacacgggtctcataaatgagacttgtttgaattttggtacattggagcatgttggttggtattacacggcagcatttcgaatgagtgcagctctgtgtctgtcagaaaggagagataagactactttgaagggaattaaatatgtgagtcctctttttaatggtgctttttgtaacctttaatgctgaggtacagagctgcttttcaatatttcataaaggagtggcagacaagagtggattttaaagctgttcttcaaacgtaatttgtcactggactctgacacacctggaaattatatgatatgatacatacagaaatgttgtgggttttttccataaaactttaataaaagtattatacagcaataaaaaaaaaaaaaaaaaaaaatctttgatgtggtgcccnnnnnnnnnnnnnnnnnnnnnngtcgactacggctgcgagaagacgacagaaggcacaattcactctggaacaccctgcacagcaaaggcatgggggctggagatcacatctcatgccaggaacagtgagtgggcagtaggaggtgcgacagacggctggaggacatgggtgggtagcccagatctcagagagccttgaatgccaggcctgggagttccaactgcaatttctataaagctacgattattaaaaatagataaaatgtacttttatgccaacaaactatccaactgctttcctaggaggtggtaaacaaatcctatcaccctgtttcaacagaagactacaccatggctcctgatcacacctaaaattccacgataatcacattaaacaatcttttattgtgttttattacttaaaaatttttatattgtttattactaaaaaaacaaatacacacaacgtgaatgtacttactgccactgaactgtgtacctaaaaatggctaaaatggaacactttatgttttgtatgttttaccaaaattaaaaaaaaaaaaaaaaaaaaaaaaaaaaaaaaaaa

SEQ ID NO: 7316 - DNA, 3877 bp, Homo sapiens
  misc_feature (3009)..(3030): n is a, c, g, or t
ggaacgagaacagataaactcactaaggcggttcctaacgcgtacagcgacggctctgtgcgagcggagactctcacggcacgagggccaggaacgccagccgttcacgcgttcggtcctccttggctgactcaccgccctcgccgccgcaccatggacgcccccaggcaggtggtcaactttgggcctggtcccgccaagctgccgcactcagtgttgttagagatacaaaaggaattattagactacaaaggagttggcattagtgttcttgaaatgagtcacaggtcatcagattttgccaagattattaacaatacagagaatcttgtgcgggaattgctagctgttccagacaactataaggtgatttttctgcaaggaggtgggtgcggccagttcagtgctgtccccttaaacctcattggcttgaaagcaggaaggtgtgcggactatgtggtgacaggagcttggtcagctaaggccgcagaagaagccaagaagtttgggactataaatatcgttcaccctaaacttgggagttatacaaaaattccagatccaagcacctggaacctcaacccagatgcctcctacgtgtattattgcgcaaatgagacggtgcatggtgtggagtttgactttatacccgatgtcaagggagcagtactggtttgtgacatgtcctcaaacttcctgtccaagccagtggatgtttccaagtttggtgtgatttttgctggtgcccagaagaatgttggctctgctggggtcaccgtggtgattgtccgtgatgacctgctggggtttgccctccgagagtgcccctcggtcctggaatacaaggtgcaggctggaaacagctccttgtacaacacgcctccatgtttcagcatctacgtcatgggcttggttctggagtggattaaaaacaatggaggtgccgcggccatggagaagcttagctccatcaaatctcaaacaatttatgagattattgataattctcaaggattctacgtttgtccagtggagccccaaaatagaagcaagatgaatattccattccgcattggcaatgccaaaggagatgatgctttagaaaaaagatttcttgataaagctcttgaactcaatatgttgtccttgaaagggcataggtctgtgggaggcatccgggcctctctgtataatgctgtcacaattgaagacgttcagaagctggccgccttcatgaaaaaatttttggagatgcatcagctatgaacacatcctaaccaggatatactctgttcttgaacaacatacaaagtttaaagtaacttggggatggctacaaaaagttaacacagtatttttctcaaatgaacatgtttattgcagattcttcttttttgaaagaacaacagcaaaacatccacaactctgtaaagctggtgggacctaatgtcaccttaattctgacttgaactggaagcattttaagaaatcttgttgcttttctaacaaattcccgcgtattttgcctttgctgctactttttctagttagatttcaaacttgcctgtggacttaataatgcaagttgcgattaattatttctggagtcatgggaacacacagcacagagggtaggggggccctctaggtgctgaatctacacatctgtggggtctcctgggttcagcggctgttgattcaaggtcaacattgaccattggaggagtggtttaagagtgccaggcgaagggcaaactgtagatcgatctttatgctgttattacaggagaagtgacatactttatatatgtttatattagcaaggtctgtttttaataccatatactttatatttctatacatttatatttctaataatacagttatcactgatatatgtagacacttttagaatttattaaatccttgaccttgtgcattatagcattccattagcaagagttgtaccccctccccagtcttcgccttcctctttttaagctgttttatgaaaaagacctagaagttcttgattcatttttaccattctttccataggtagaagagaaagttgattggttggttgtttttcaattatgccattaaactaaacatttctgttaaattaccctatcctttgttctctactgttttctttgtaatgtatgactacgagagtgatactttgctgaaaagtctttcccctattgtttatctattgtcagtattttatgttgaatatgtaaagaacattaaagtcctaaaacatctaaaaaaaaaaaaaaaaaaaaaaaaaaaaaaaaaaatgtttgtggctgttgatgcatattcgtgatgtaacaggtcctggggcctcactttaccccatttgtaaaatggggctaatgtcacctgcctcttacctacctcagagggatttggtgaagcaaactgttaatcttcgaaaacgaccatttcacttcttggatatcaagtgctaacccagtatgttcttcttttttatgtaagggacagctttctccacagagtcctttctgctggtgaggacagcatttctgagcagggctttgttctctatgtgcattaggacttttatcatgcccttgttctgtgtgtagttacttgacagcatcaaatgccgcctcttcctaatgtccttcaagttttcatgaactagcaaccccaccttccaccatggttctgggcgcctgattttgctgtgactcccagacccagccactgtttctgccaccctgtaacaggccattaaagctccccagtgttcagcctccttcactcccttgttttccctgttgctatgtgtcacctgggccctacagacaggggcacacgcttatggatgtgtgtaccattgagatgagaatgggtagatggaacggagaccatcaagccacacccccttcttaaaactggggacatgagcctgagcagaaagggtgaagaagagccatgggacacagagttgacccagccagggggaaagcccannnnnnnnnnnnnnnnnnnnnncattccagtctcctgtgaagccaaaagggaccaggaaccgtgcaaaggaaactggaaacttttccccgctgggtagagcatgttgctgatactcttctgttttcaagggaaacaatcacattgtttgattccaaatggtaaatgaacactcactattcttcaggcttcagtaaatctttttttcttccttcatatatatatacacaacacacacacacatatgtatatctatacacacatgtgtgttgtgtatatgcatgtgtgtgtgtgcgtgtgtgtatagttttagctccaagccaagcaagtttgtgtttggatagaggggaacttaactattaactacaagttgtatgtctgtggtatcttgattttcccatttctaaagatgaatttcacaaagccataaagcgtgaaattagagctggacttaagactcattggccgaccatcctgtgtcctggcctggccctgcagtaagaagcgtgtctgggtctggagaagggtgcttccgagagtgtgcaggtggcccttccccttggaggcgagaagagagaatgtgctgtctatcttcctggttttcagtccacagagtcggtagaccaggggttacgtgactggggaaaatctcacatctccttgtctgaaaacatttcccctgctgttctctttctaacatgttgtggtaaatctgttcagatactgctcatctgactgttttgtacatgtgacaattgccttaaaacctagcacagtcctcagaaatgaataccgtgtttccactggaaaaaaaaaaaaaaaaaaaaaaaaaaaggggggaggggagggcgggcttttccccccccttgaa

SEQ ID NO: 7317 - DNA, 688 bp, Homo sapiens
  misc_feature (563)..(590): n is a, c, g, or t
  misc_feature (598)..(598): n is a, c, g, or t
  misc_feature (615)..(615): n is a, c, g, or t
  misc_feature (654)..(654): n is a, c, g, or t
gagagctttactacttagtctcattcacttttgcacgcaccgagcccaaggtgaatactgttcactccatgaaaggaaatgattgagaaatgaaagggagagtcaaggtaaaaagtggcaaaagaaatacagtgtgagaagggaacagagctgaaggcagaacagaaaggcaagagcacatatgattataacccagcagctggaactaggccaggtccttgtctcacttgtcttggcagctcatgttataggcaaatgcacctctcatagcaaggactaaattcatatttacaaaatgaataaactaaatgatctcttaccttagatggcctatgattaatatcattttcatgttactgatgtacacatttactggaggtctggcacttaattttgatgaatattctatgttaataccacattttagatacatattcagattgctgaatttagtcatttctatgtactttactcacatatgtctatgaagatcgtctttactgcactacaagctctcgaaaggtacaaaatcccctaaataacgacctaatggtttcacatannnnnnnnnnnnnnnnnnnnnnnnnnnnaaatgctnttataattcaataatgngtagtgctaacagaaagcaagaaacagttcagatatgangaaatgatcagactcagaaatcaatcattgatag

SEQ ID NO: 7318 - DNA, 1104 bp, Homo sapiens
  misc_feature (11)..(28): n is a, c, g, or t
ggatcaacgannnnnnnnnnnnnnnnnnacctaaactagatgaacaccaagtaacattgccctaaccatagagttgctcatttaaagcagacatccagtaacaatcaatacacagagcaaggacacagtgagcgaaattgaagagaaaaaggcgatcagaagctggacaaatatggatttcagaaggatggtcatgatcgaacctgaacaaaaattaatagtgtaaagctgaattctctgccatctgaatatgagagtgggtcagcatgccctgctcagactgtgcactacagaccaatcaacttgagcagttcagagaacaaaatagtcaatgttagcctggcagatcttagaggtggaaatcgccccaatacagggcccttatacacagaggccgatcgagtcatacagagaacaaattcaatgcagcagttggaacagtggattaaaaatccaggaaggggaggggtcatgaagaagaaaccaggggagtaatttcttaccaaacattaccaagaaatatgccaagtcacagagcccagattatggcccgctaaccctgaaggttatagaacactcccaagaaacagcaagacaaggcctgaaagtatctgcagtgtaaccccttccactcatgacaagacattaggacccggagcggaggagaaacggaggtccatgagagatgacacaatgtggcagctctacgaatggcagcagcgtcagttttataacaaacagagcaccctccctcgacacagtactttgagtagtcccaaaaccatggtaaatatttctgaccagacaatgcactctattcccacatcaccttcccacgggtcaatagctgcttatcagggatactcccctcaacgaacttacagatcggaagtgtcttcaccaattcagagaggagatgtgacaatagaccgcagacacagggcccatcaccctaaggtaaaatagctgctgattttgtgttaactcactaccttataaatgctgtgttttctttctagtatactattttaaatgtgagagacaaaagaatggggataaagtaagcaaggcagctcttttttgttttaaaaaaaaaaaaaaaaa

SEQ ID NO: 7319 - DNA, 11411 bp, Homo sapiens
  misc_feature (908)..(968): n is a, c, g, or t
  misc_feature (3559)..(3586): n is a, c, g, or t
  misc_feature (4396)..(4426): n is a, c, g, or t
ggagccgcggggcttccatccttcctttgactgatttttaaattttaatttgtattttccccgccgccccgccccttttcctccgaccccgccctatcgctccccggcttccctgctctttcctttttcccggcttccttcctcgcgtttctttcccctgcgccctcggcttgcctctctccctcctccctcgctctctcccccttctctccccttcttcctcggtttcttccgtcctctctctccccctcctcctcccccgcctcctcctcctgcgctcccgccccctgccccctccccccgtgcctgcagacgcgcggatcgtccatgcgctcctcgcgggcagaatgctgggcagcagcgtcaagagcgtgcagcccgaggtggagctgagcagcggcggcggcgacgagggcgcggacgaaccgcggggcgccggcaggaaggcggcagcggcggacggcagaggcatgctgcccaagcgcgccaaggcgcccggcggcggcggcggcatggccaaggccagcgcggctgagctgaaggtcttcaagtccggcagcgtggacagccgtgtccccggcgggccgcccgcctccaacctgcgcaagcagaagtcactcaccaacctctcttttctcacggactccgagaaaaagctgcagctttatgagcccgaatggagcgacgatatggccaaggcgcccaaaggcttaggcaaggtggggtccaagggccgtgaagctccgctgatgtccaagacgctgtccaagtcggagcactcgctcttccaggccaagggcagcccggcgggcggtgccaagacccccctggctccgctcgcgcccaacctgggaaagccgagccggatccctcgaggaccctatgcggaggtcaagccgctcagcaannnnnnnnnnnnnnnnnnnnnnnnnnnnnnnnnnnnnnnnnnnnnnnnnnnnnnnnnnnnngccaaggcgcaaaagagctctgggcctgtcccctctgccaagggccaggaggagcgcgccttcctcaaggtggaccccgagctggtggtgaccgtgctgggagacctggagcagctgctcttcagccagatgctggacccagagtcccagagaaagaggacagtgcagaatgtcctggatctccggcagaacctggaagagaccatgtccagcctgcgagggtcccaggtgactcacagctccctggagatgacctgctacgacagcgatgatgccaacccacgcagcgtgtccagcctctccaaccgctcgtcccctctgtcatggcgctatggccagtccagtccgcggctgcaggctggtgacgcgccctctgtgggtgggagctgccgctcggaggggacgcccgcctggtacatgcacggcgaacgggcccactactcccacaccatgcccatgcgcagccccagcaagctcagccatatctcccgcctggagctggtcgaatccctggactcggatgaggtggacctcaagtccggctacatgagcgacagtgacctcatgggcaagaccaggctgaggatgatgacatcactacgggctgggatgaaagcagctccatccgtagtggactcagcgatgcctcagacaatctcagttcagaagaattcaatgccagctcctcactcaactccctcccaagtactcccactgcttctcgcaggaactcaacaatagtgctacgcacagactcagagaagcgctcactggcagaaagtgggcttagctggtttagtgaatcagaggagaaagcccctaaaaaactggagtacgacagtggtagcctgaagatggaacctgggacttctaagtggcggagggagcggcctgagagctgtgatgattcatccaagggtggagaactgaaaaagcccatcagcctgggccaccctggttccctgaagaagggcaagaccccacctgtggctgtaacttcccccatcactcacacagcccagagtgccctcaaagtcgcaggcaaacctgagggcaaagctacagacaagggtaagcttgcagtgaagaatactgggctccaacgctcctcctctgatgctggtcgggaccgcctgagtgatgctaagaagcccccctcgggcattgctcgcccctccacttcgggatccttcggctacaagaagcctcctcctgccacaggcacagccactgtcatgcaaactggtggttcagccactctcagcaagatccagaagtcctcaggcatccctgtcaagccagtaaatgggcgcaagactagcttagatgtttccaacagcgcagagccaggattcctggctcctggagcccgttctaacatccagtaccgcagcctgccccggccagccaagtcaagttctatgagcgtgaccggcgggcggggtggacctcgccctgtgagcagcagcattgaccccagtctcctcagcaccaagcagggaggccttacgccttccagactgaaggagcctaccaaggtagccagtgggcggaccactccagcccctgtcaatcagacagatcgggaaaaggagaaggccaaagccaaggcagtggccttggactcagacaacatctccttgaagagtattggctccccagagagtactcccaagaaccaagcaagccaccccacagccaccaagctggcagagctgccaccaacccctctcagggccacagcgaagagctttgtcaaaccaccctcactagccaatcttgacaaggtcaactccaacagtctggatctaccatcatccagtgataccacccatgcttcaaaggtcccagatctgcatgctacaagctcagcatctgggggccctctcccttcctgcttcacccccagtccggcacccatcctcaatattaactcagccagcttctcccagggcctggagctaatgagtggtttcagtgtgccaaaagagacccgcatgtaccccaaactctcaggcctgcacaggagcatggagtccctccagatgccaatgagcctccccagtgccttccccagcagtactcccgtccccaccccacctgctccccctgctgctcccacagaagaagagacggaagagctgacttggagtggaagccccagagctgggcaactggacagtaatcagcgggatcggaacactcttcccaagaaagggctcaggtaccagcttcagtcccaggaggagaccaaggagaggcgacattcccataccattggtgggctgcctgaatccgatgaccagtcagagctgccttctccccctgcacttcccatgtctctgagtgcaaagggccaacttaccaacatagtgagtcccactgcggccaccacgccaagaatcacccgctccaacagcatccccacccacgaggcggccttcgagctgtacagcggctcccaaatggggagcaccctgtccctggccgagagacccaagggaatgattcggtcaggatccttccgagaccccacggacgatgttcacggctcagtgctgtccctggcctccagtgcctcctccacctannnnnnnnnnnnnnnnnnnnnnnnnnnntctgagcaaatccggaagcttcgtagggaactggaatcatcccaggaaaaagtggccaccttgacgtctcagctttctgccaatgctaatctggtggctgcttttgagcagagcctggtgaatatgacatcccgcctgcgacacctggcagagacggccgaggagaaggacactgagctgctggatttgcgagaaaccatagactttctgaagaaaaagaactctgaggcccaggcagtcattcagggagcccttaatgcctcagaaaccacacccaaagaacttcggatcaagagacaaaactcctcagatagcatctcaagcctcaacagcatcactagccattccagcatcggcagcagcaaggatgctgatgcgaaaaagaagaaaaaaaagagttgggtctatgagcttcgaagttccttcaacaaagcgttcagtataaaaaaggggcccaagtcagcttcctcatactcggatatagaggagattgctacacccgactcttcagccccctcatcccccaaactacagcatggttctacagagactgcttcaccctccatcaagtcctccaccttgtcctccgtgggcactgatgtcaccgagggccctgctcacccagccccccacactaggctgttccatgcaaatgaggaggaggagccagagaagaaggaggtatcggagctgcgctctgagctatgggagaaggaaatgaagcttacagacatccgcttggaggccctcaactctgcccaccaactggatcagcttcgggagaccatgcacaacatgcagttggaggtnnnnnnnnnnnnnnnnnnnnnnnnnnnnnnnaaggtagccccaggcccctcatcaggctccactccagggcaggtccctggatcatctgcattatcttccccacgccgctccctaggcctggcactcacccattccttcggccccagtcttgcagacacagacctgtcacccatggatggcatcagtacttgtggtccaaaggaggaagtgaccctccgggtggtggtgaggatgcccccgcagcacatcatcaaaggggacttgaagcagcaggaattcttcctgggctgtagcaaggtcagtggaaaagttgactggaagatgctggatgaagctgttttccaagtgttcaaggactatatttctaaaatggacccagcctctaccctgggactaagcactgagtccatccatggctacagcatcagccacgtgaaacgagtgttggatgcagagccccccgagatgcctccttgccgtcgaggtgtcaataacatatcagtctccctcaaaggtctgaaggagaaatgcgtcgacagcctggtgttcgagacgctgatccccaagccgatgatgcagcactacataagcctcctgctgaagcaccggcgcctcgtcctctcgggccccagcggcacgggcaagacctacctgaccaatcgcttggccgagtacctggtggagcgctctggccgtgaggtcacagagggcatcgtcagcaccttcaacatgcaccagcagtcttgcaaggatctgcaactgtatctttccaacctagccaaccagatagaccgggaaacaggaattggggatgtgcccctggtgattctattggatgacctgagtgaagcaggctccatcagtgagttggtcaatggggccctcacctgcaagtatcataaatgtccctatattataggtaccaccaatcagcctgtaaaaatgacacccaaccatggcttgcacttgagcttcaggatgttgaccttctccaacaacgtggagccagccaatggcttcctggttcgttacctgaggaggaagctggtagagtcagacagcgacatcaatgccaacaaggaagagctgcttcgggtgctcgactgggtacccaagctgtggtatcatctccacaccttccttgagaagcacagcacctcagacttcctcatcggcccttgcttctttctgtcgtgtcccattggcattgaggacttccggacctggttcattgacctgtggaacaactctatcattccctatctacaggaaggagccaaggatgggataaaggtccatggacagaaagctgcttgggaggacccagtggaatgggtccgggacacacttccctggccatcagcccaacaagaccaatcaaagctgtaccacctgcccccacccaccgtgggccctcacagcattgcctcacctcccgaggataggacagtcaaagacagcaccccaagttctctggactcagatcctctgatggccatgctgctgaaacttcaagaagctgccaactacattgagtctccagatcgagaaaccatcctggaccccaaccttcaggcaacactttaagggttcggcaatcactgtcacccccggacagcagaacgctggcatcagctatcttagctcctcctctcccctctcctctttcagagcactggctctccagccccaggaggagaacaggagggaggaggagatgaaagaggagggacaggttcttggtgctgtacctttgagaacttcctaggaaggaatggtggggtggcgtttgggaacttgtgccccctaaacacatttactggcctcctctaatgactttggggaaaagatgattctgggtctttcccttgacttcttgtttcaattacaaactcctgggctttctggggaggggttcagaaaacatcaaaacactgcagcagttcctaaatgattctcacaagcaaccctgagagagacagtcttgtgagggagatctgggggaggcaggaagctcctcagattttctcacagacccttcccaattccatcaccactgccaacaactcctcccccagagatctggctggagcccagaaaaagaagcatgtggtttaaaaaatgtttaaatcaatctgtaaaaggtaaaaatgaaaaaacaaaaacaagcaaacaaacaaaaaacaatggaaaagatgaagctggagagagaggaaccagttgccaaggtagagagctgcccgctcctgccctctggatgacataggggacatcaacaagacggctgccaacctgagaagtcaccaaaccacaaaaataaccttacagccttcagggaaagactaccagctctgtctttctaccctctaatttaacaatgcataagagtcaataaaccctacttttttatttttggtttttattttgttttcatttttttctcccatttgcctatttatttttttgtttcccttttttttttctttttccgtttttccatttcctcacatgtccacgagatgcttgggttgcttttccaggggctagtttggcttttccaagtgggttttctttggagaatctgatgccatgcaattggcatgacacctgccatgccactatctttggcatccatggggcttatatgagacatgaagcattggctcagaagtagagggagaagaggaacccagttcccttgacttcccttttgagagcacacgttctgctgggtagctcaattgccagcctctgtcatgagaaggtatagccccatcttgatagaagagttactccgagctttatcatggaccagaggaaaaccagaaaactgaaaacattcctctgtcttgtggccagtttggcctttcactgcactattctgatggtgcctgactgaatccaaatatcctagctggctcttactatttttcacaaatgagtattcacatataagagatgaacatccatgtgagatcatcccaatcagaatataagactcaaggagtttgacttggtggccaatacctgccttccaaagagatcctacctttgcagatttgctcctttcccattgccttgaaggtctggcaatccctgttctttcatttgacaagtacttactgagtactcactatatacaaatcattaggttaaaacagacacacacacacacacacacacacacacacacacacacacacacaagacctgggcccttaagtttacagtccagcaggaaatgttaacctccattcagctacgcccccttgttatctagaccttcgggatcatctaagaaatgtagctgaaacccaaggagccagctagaaagaagcttttgattagatgtacaatacattgggggcagaagatctgggatcaattaagatggagcctgaaggactatggaatcttgcttgtcaggaatgggcaagtctacttcctgccatttctgaaagccccgcgggaccagcttctaggctgagctgcctagtaggctgaagcttcaggactctgcaggtcaaggatatgtgatgagcaccggcctaagtgtttgctcttcagattcctaagtagcacaagactttatcagaatctataggcataccaacctggatcactcttccacccaaccgaggagtagatgcatctgaatcttcatatcggtatattaagtccaaaagatggtccgggctgcccctcacaaaagcttctgcatccacgtggtaagctcccatggatgacagggttctgtatgatggagactattattgctattgctgctaattccatgagctgtgaagatccctaaccaactcagctgtaacatatgcaattctgtggtgggaagaggctgtgtgtccaaggatggtgctgaaatcactgccttaaggtctctgctgtgcagaatgaggaggcccccgagctggctgttctaacttagaaggaagagaagactggatgggcctgcttgggatctaggcctcttctaaaccctatcctaagctccagttccatggcaaggctcagacttttaatgccatcttaatctgatggttgagcgcttcactctattttctggtgctgcccagccagtgccttctgccatggatgttactggctacttgagaaaaaggagaggggagaaccccttctttcattccaactgcctccgaccccaaagggattcttggctctctggtaaccatggataccaccatgaattttatttggatcctcagcaggttgattctggaggcctcatgctatgactttttatttctcttcctgggatccaccaccctctactctcagctgactgctgcatttaggccaggtctccaattgctttcctccagaaagtgtgttcccgtctagtgaggtagtattgaagcctcggctttccctctggagcctgggaccctgtttacagttgcacatctgggcccctcactgtggggattgatcattctcatgaaggaatcacagttatatggcaactgcagaaggctgagcctcctcatggtgctataaccccttgggacactcatccagacttctctgaagcagaaaacctgagctccccactcactgccctagaatttatggcaaggagcaaatctacagcattctctcccacctacgtcctgcttcttggttgagactactgggatccttcagaaaagaaacactgggtcccatagctaaattctcaaccgccaggcaccttcagaagaatccagcctaatactggaatttgtgctattatcttcctctccagccccccaactccatccctcaccacagttgtctaggaaatgacatgaattcaatatctaatgtcaaccaatggggagagccacaactccaggagaggttcctgagctgagtcccttaatttctggatgaagaagaccaacaagttttgtccaatgtatttgtttctcagaccttgcctaggcactaaaaataaaatactaggtcattggaggctaatgtgggacctgatgtctgcgtgtgtgtgtgtgtgtgtgtgtgtgtgtgtctccctctctcacacacacaagagcagtttgctgttgctgtttcctaccttctgaggcttcaaagtattttttaaaatctatgctttgtggcagctctacggtgcttatctctgtctttgtgtcaatccttaagtacccatgtctttttcatgtctaaccattgggaaggtagaggctggcagggaagacaaatctgctacaagtccatgggaagaccctacaatgaaatgttcattggttggtatactgttttagtcttgaattgccaactttccaactgatctatccatattccttaagtactaaagacaaaatagagggcttctttttctctcttaatgtcttgccttctggttttcctggtttgcaagactaagtgtacctaatctcaccatctcttcacttctagctctctgaaacaagggtcacactactcagagggataaccccttacagtggtctgaggagtaactatttcctaaagtattctaaaagagtaggaagagagaaatggtagcctgctgcttctcacagacacctcacatcctcacttgggatggcatccacatagaaaccctgcatttaggtaaaatttgcctgactgaaggggactcagtcctccaaatcaaggtcaagaagatatctgcatgagaccttaagaactctttattgccattatttggagagggcgggggaattatcctaatcacacatttaacacagggaataagtgctgaagtgacccagatcaccaagcgcagttcctcatcatactttatttttgctttccttattccttggcactgactaagctaaagttaagaagccgacttcataagccaacccctgtgatgggatggaaaaatgggcttttgcagagggtttattaatagagatggatatactactcacaagttctggctcatggctccactgagaaggccatagtaataaaatgatcttatgaacactgttccccaaaggccaaagcctgaagatattgccccttataatccaatcagccttatattttaataagtcctgaatcaacctgactacggatatatggggccaccagggtgcatgggtgcatgtctgctcagcctagccctggaagtgagcactgccggccacagatcctgggaaaggtggtagtaacccagaagatgtagccttgaagggaggatacctatcaaaatgccaaagctgcagggacacgaagacggttgaaaattcaacctatgtatactagatccttccagtttgatggtttggtcattcttcttcatgattataccatggagaattttctgtgacaagggtggtcatggaagtaagtgagtgatcccctggtttctcattccttaaagcagtggttcgcaaagtatggcacaagaccagcagcatcagcagcctttgggaacttgttagaaacgaaaattctcaatcccatcccagatctgctgaatcagaaactctaatgagaggacccggcaatccacgttttaataagccctcctggtgattctgatgcacactaaattcaactgttttaaagggaaagccctttatagtattggagttcccacactgagaggctttggggcccaaaataagaaggttttaggttgtcattcagactttaacattaatttcaaagtcacctttctcatgcttccttgtgtttctgtttttccatttatgattttaacaaagaaaggtatgtgtgcttttgggtggaagttaggagaatgtttgtgtctttcctagttgaatacaaccttcagagaaaaaccttatgccttggaaattactacctggcacacaaaggggcttcaacaaggaaaagcagttggaggtctcttccagattgctcttctgccgaattatttgtatctattccgagctgattatgtaataggatggaaaaagtaaaaaaaaaaaaaaaaaaaaaaaaaaaaaaaaaa

SEQ ID NO: 7320 - DNA, 1189 bp, Homo sapiens
ttgctggggggcctccgccgtgaggcgtgcctatcggaacacagtggcaaaaaatgttgtacggatggttgatacctgcggggaattcaaggggcagggtcagggggagggtgggaattctgcgccgttccggacgggggcaagtaaaagccggggcttgtggcgtttctcccgggttggagtggcccagtttcattgaagagttggtccgcatagaactcattcggggggccgcttcttatgtccccacccgcggtaccacggagagggggccaagcatatgggcacttgatatgggatttcccggtcggcgtgccacgaaagtgcggtttctttagtgtttctcgggttggacccgggatttcccacagacccttggaaatacactgcgtttgacgaggagccagtcttggtgagccacaccatcaataaagatctggggacagcagattgttcaatcatatccctggttttcaatttttaaccccatgcattgatggaatcacaggcagaggctggatcctcaaagttcacattccggacctcacactggaacacatctttgttccttgtaacaaaaggcacttcaatttcagaggcattcttaacaaacacggcgttagccactgtcacaatgtctttattcttcttggagacgatggcgttgttgatcttctttaatatgtttaccaactccatttacgccgtatctcatcaccatggcgagctgcttcttggtcctgccgtccgcccccagctgaagcatccccaggaccgacgcaatcccatggggagagatcacgatgttgtcatgaggcctcgacttcacaatctgattgaaaacctggatccccgtgttggagcctagttcctcgagagacagaggattgaagtgggagcagatggaaggcagcgtcacagaggccaagaggaagagggggagatgccagttcatggttccttccaccaaggacgaccgcgctcgctggatccccagggggcggccgcggagggcggtgcggccgcaaccggagcgggagcctggtctcggcggcgcggggagtcggaggacgcagccaagcggcggcggcgaggagggtcacagccggaaagaggcagcgatggcgcactgcaaacgtaccgcgcaggtgacgaaataacaacagggacgcactcataatatttcgtt

SEQ ID NO: 7321 - DNA, 3046 bp, Homo sapiens
ggcacgagggattacttagagaggcacagaggagagagatcggggtgagtcgccatggggactcccagggcccagcacccgccgcctccccagctgctgttcctaattctgctgagctgtccctggatccagggtctgcccctgaaggaggaggagatattgccagagcctggaagtgagacccccacggtggcctctgaggccctggctgaactgcttcatggggccctgctgaggaggggcccagagatgggctacctgccaggatctgatccggaccccacgctagccacccctccggccggccagactctcgcagtgccctccctgccacgggccactgagccggggacagggcctctgacaacagccgtcacccctaacggggtcaggggggcaggccccactgcgccagaactgctgaccccgcccccaggaaccacagccccacccccacccagccctgcctccccagggcctccccttgggcctgagggaggagaggaggagacgacgaccaccatcatcaccacgacaactgttaccactacggtgaccagcccagcctacctcctgagctgtggcttccctccccggccggcccatggggacgtgagtgtgacggacctgcaccctgggggcactgccacctttcactgtgattcgggctaccagctgcagggagaggagaccctcatctgcctcaatggcacccggccatcctggaacggtgaaacccccagctgcatggcatcctgtggtggcaccatccacaatgccaccctgggccgcatcgtgtccccagagcctgggggagccgtagggcccaacctcacctgccgttgggtcattgaagcagctgaggggcgccggctgcacctgcactttgaaagggtctcgctggatgaggacaatgaccggctgatggtgcgctcagggggcagccccctatcccccgtgatctatgattcggacatggacgatgtccccgagcggggtctcatcagtgacgcccagtccctctacgtggagctgctgtcagagacacctgccaatcccctgctgttaagccttcgatttgaagcctttgaggaggatcgctgcttcgcccccttcctggcacatggaaatgtcactaccacggaccctgagtatcgcccaggggcactggcaaccttctcgtgcctcccaggatatgccctggagccccctgggccccccaatgccatcgaatgtgtggatcccacagaaccccactggaacgacacagagccggcctgcaaagccatgtgtggaggggagctgtcggaaccagctggcgtggtcctctctcccgactggccccagagctatagcccgggccaagactgcgtgtggggcgtgcacgtccaggaagagaagcgcatcttgctccaagttgagatattgaatgtgcgggaaggggacatgctgacgctgttcgacggggacggtcccagcgcccgagtcttggcccagctgcggggacctcagccgcgccgccgccttctctcctctgggcccgacctcacactgcagtttcaggcaccgcccgggcccccaaatccaggcctgggccagggcttcgtattgcacttcaaagaggtcccgaggaacgacacgtgccccgagctgccacctccggagtggggctggagaacggcatcccacggggacctgatccggggcacggtgctcacctaccagtgcgagcctggctacgagctgctaggctccgacattctcacttgccagtgggacctgtcttggagcgccgcgccgcccgcctgccaaaagatcatgacttgtgctgaccctggcgagattgccaacgggcaccgcaccgcctcggacgccggcttccccgttggctcccacgtccagtaccgctgcctgccagggtacagcctcgagggggcagccatgctcacctgctacagccgggacacaggcacacccaagtggagcgatagggtccccaaatgcgccttgaagtacgagccgtgcctgaacccgggggttcccgagaatggctaccagacgctgtacaagcaccactaccaggcgggcgagtctctgcgcttcttctgctatgagggctttgagcttatcggcgaggtcaccatcacctgtgtgcccggccacccctcccagtggaccagccagcccccactctgcaaagttgcctatgaggagctcctggacaaccgaaaactggaagtgacccagaccacagatccatcacggcagctggaaggggggaacctggccctggccatcctgctgcctctaggcttggtcattgtcctcggcagtggcgtttacatctactacaccaagcttcagggaaagtcccttttcggcttctcgggctcccactcctacagccccatcaccgtggagtcggacttcagcaacccgctgtatgaagctggggatacgcgggagtatgaagtttccatctgaaccccaagactacagctgcaggacccaggacgcccctcccctcctcattcgggcagagggaaatacgggacccggtctctgcctcctggctgccctcctccctggctgtgtaaatagtctccctatcccacgagggggctttgatggccctggagatcctacagtaaataaaccagcatcctgccgcccaaagccgcctcttctcagttgccaaacgaggggcctgccccccgccctaccggcttttggattctgggaggggaactctgcctccctgcaaatcttgcagcccctcctgcccagggcacccctcaaggactgcccccgatagctctactgttcccttggccacgaaggtgcccccctcccagatgccctggccctaggcctgactccggccaggagggtcagaagaaggacaaaggggagagctgggacaaggccttgcccccttcctgccatctccccaacccacagtctctccacctttgcttctgaattcttgtttttgagcaataaacagaaaatcgccacttgtaaaaaaaaaaaaaaaaaaaaaagg

SEQ ID NO: 7322 - DNA, 3531 bp, Homo sapiens
  misc_feature (3146)..(3152): n is a, c, g, or t
ggccaagggattgctgcagccctcatccaccttccaagcactggaaacaaacattggagaccaaggtctccagaagcttccactgactgctgttggctgcaccaggcaacagggtctggctctgtcacccaggctggagcggacgcgtgggctcggctcactgcaacctctgcctcccaggttcaagcgattctcctgcctcagcctcccgagtagctgggattacaggtccagctgggagctccccgacctccaggagggcaagatccaagccatcagcgactcggatggggtgaactacccctggtacggcaacaccacagagacctgcaccatcgtgggccccaccaagagggactccaagttcatcatcagcatgaatgacaacttttaccccagcgtcacatgggccgtgcccgtcagcgagagcaacgtggccaagctcaccaatatctaccgggaccagagcttcaccacctggctggtggccaccaacacctccaccaacgacatgatcatcctgcagacgctgcactggcgcatgcagctcagcatcgaggtgaaccccaaccggcccctgggccagcgcgcccggctgcgggagcccatcgcccaggaccagcccaaaatcctgagcaagaatgagcccatcccgcccagcgccctggtcaagcccaatgccaacgatgcccaggtcctcatgtggcggcccaagtacgggcagccgctggtggtgatcccgcccaagcaccggtgacagccaggaccacccgctaggttagactcacaaataataataccgctgaaaacaaaactcagactcactcttcagtcattcagcaagatacaaccattctaccctctccagcgggcggatctcactgtgctgatgcccccgggaaggcctccccggctctcggcacctgcttcctttcagggagaggggagatctaagcaggacagacagaccccacgtgcgccctcagggtgacctctggtctccttgcctctcctttttctcagtttcagtcgctcacttgtaacagattccctgaaacactgctttttccgttttttaaaaaaactcctcttttgggggctcaggggcaggaggagggggagctgattaggagggaagctccagcccccgatcaaagagacagatccacactgctgccgatttgtggcgctggccggccttccccccaggtccctccgccctctgtcatgcggccttatgtagacttgctttgccaaacttttgccttaagctgaattgaaaggaagaaaaccaatcggagaaagaaagcaggatctcttttctaccggacttttcctcttctgccagaggtggagggagggttggggtcgcccgcgagagtctcttgagcccttcttcccggttgtcttgggagaagggtgaggatgggcatttagacccgaaaccagctgctcactctttctttttggcagaaataaaaccacaggtagattctgcctgaacagccccttctctccctccacccccaggtcgtatccctgcacctgcggagaggggctgtgagctctggcggggggtggctccaccagtcgcctggcctcttctcccctctcttcccagcagccttaacttcccttgggcggctctaggaggagagaggcaggctcctgtgagcccagggaattttcaccctctcagtcctcaggacccacccccagttgagtccctggcccttcctccaggtgtgtggctttttccttctccatccacactggtcccaaatgcctgggggccggccacctggaccgccgacacacagcctcaatgttagtctcaaaggtaaggaaggcattcacgtcccttcttgcagggcattttaagacttgaatcgggtgggccccggcccctgtggctggctggcccctggtgtactgtaaaagggccaagacagggctcgttctcaggggcgcccctcccaggccctcagggcagcgggacggtgcagtcaggctctgggtgccacagtgatggaggtggaaggcacccaagctctagggaagtcttgggaggcagtcggccgagcccctgcttcctgtcctcaaataagtgaatccaggccaagggctgggagggctgggtgggcttatcgtcgagagggttcagagccactctggaggctgggctggcacagtggagagcaacaggtgaggacagacgtctggaagcccatccctgggacctgccctccctcggtcccaggtcactggagctccagggcttacttagtcctgacccattgtgccagggttctgagcagtgtcggccttgtggccacttgcaggggctattaggggacatcccgctgaagccacgctccttccagcttgccaaacccacagctacccgcccgggacccacactcagcctaataattatcaagcacagaaaaccgtccatttagaaaaataatccatttctgctgcagatgagccacttgtaagagtctccgtgacagcgtgggacggtgtgggaaccaaagtccctgccctgctcctttgtccacgggctattgcgtttattcaaggggtgcttaatgaccgtttagccactgccgtcggtctccgggcccagctcgtgccaggaggctgtcctgggacacactgggctggagctgccggctggcacggtgctcagggggcccctgatgggggccaggacctccccgcagaaactgcaggttctcttgtgaggatggaggccgtgccaccccgaaaggcagtagccttaggggaacagtgggtcccagctgcatgtctgaggatgggtggggacagggctgggactcagctttcattcactggagacttctccactcaggtctttgttgcactaaagcagggacaggaccctgggggttcaggaagcgggtctcaggccgctggtttattcctggaggtggggctggagaccagaatggaaaggggcttcctgagctgctagggggtgaaggacccccgaacccgcatttcttgagtgagagcaaacactcgaggcaggagccagcacccctcccactgcatgcccggcccccagcccaccttgccccctgacccaccttcacccgtgccccttctttctgcccttnnnnnnngaagaagggctaggaacaccctggagaggctgcaggtccggccacggacgctcagctgagccccggtctgctccttcagcctccttgctcttgttggagcacaggccccaggcttcctgccagggccccgattcttcttatgtcctccagccccgccctggcgtggacatccactcactccttccagcaataagaaccgtccttggtcgtggagagtactgtgaaacaaaccaatgcacttaccaggaggcacaagactcttgaagaagatgtaaaatgaaccttttttttttttacaaaaaacaaaaagcaaatattcataaagagaaataaaatgtaattttaaagtaaaaaaaaaaaaaaaaaaaaaaaaaaaaaa

SEQ ID NO: 7323 - DNA, 1719 bp, Homo sapiens
aacagcaactgctaaggctgccttgggaagaggatgatcctaaacaaagctctgatgctgggggcccttgccctgaccaccgtgatgagcccctgtggaggtgaagacattgtggctgaccacgtcgcctcttatggtgtaaacttgtaccagtcttacggtccctctggccagtacacccatgaatttgatggagatgagcagttctacgtggacctggggaggaaggagactgtctggtgtttgcctgttctcagacaatttagatttgacccgcaatttgcactgacaaacatcgctgtcctaaaacataacttgaacagtctgattaaacgctccaactctaccgctgctaccaatgaggttcctgaggtcacagtgttttccaagtctcccgtgacactgggtcagcccaacatcctcatctgtcttgtggacaacatctttcctcctgtggtcaacatcacatggctgagcaatgggcactcagtcacagaaggtgtttctgagaccagcttcctctccaagagtgatcattccttcttcaagatcagttacctcaccttcctcccttctgatgatgagatttatgactgcaaggtggagcactggggcctggatgagcctcttctgaaacactgggagcctgagattccaacacctatgtcagagctcacagagactgtggtctgcgccctggggttgtctgtgggcctcgtgggcattgtggtggggaccgtcttgatcatccgaggcctgcgttcagttggtgcttccagacaccaagggcccttgtgaatcccatcctgaaaaagaaggtaagtttgagatttgttagagctgaagctgcagggaaggaaagtgggaggaggctgtggacatgaatgtggttgaaagttgtaggggaattgggaagtggcatgatgatgacacaggagcccccttggacccatcgatctcatgtctgtcctgttgcaggtgcatcaccatctacagcagcggaagagtggacttgctacatgacctagcactattctctggcccgatttatcataccctttttctcctgcaaatgtttctcctcttaccttttctctgcttttttttccttaagcttctgtatcccctcagagctcacaaatgcctttgaattctttccctgacctcctgatttttttttcttttctcaggtgttacctactaagagatgcctggggtaagccgcccagctacctaattcctcagtaacatcgatctaaaatctccatggaaagcaataaattccctttaagagatctatgtcaaatttttccatctttcatccggggctgactgaacctatggctaagaattgtgacactctcatgtttcaagccaatttcatctcatttcccagatcatatttcatatccagtaacacagaagccaccaagtacaatatagcctgataatatgttgatttcttagctgacattaatatttctttcttctttgtgttctcacccttggcactgccgcccatccctcaattcaggcaacaatgaagttaatggatactctctgccctttgctcagaattgttatagcaaaaattttaaaaccaaaaaataagtttgtactaatttcaatatggcttttaaaagtatgatggagaaataaattaggataaaggaactttgaatcacaaaaatatcaaaagtaaaaatttattctcaaaaa

SEQ ID NO: 7324 - DNA, 1446 bp, Homo sapiens
ccacgcgtccgcccacgcgtccgaaataacagtcatcacccagacctactgaattagaatctcgggagtgcagggggcagcaacaggggggctgtcttttctgagatggggtctcactctgtcaccaggctggagtgccatggcatgatctcggctcactgcaacctccacctcctgagttcaagccattctcctgcctcggcctcctgagtggctgggactacgggtgtgcgccactacactcagctaatttttgtattttaagtagagacggggtttcatcatgttggccaggatggcctccatctcttgacctcgtgatccacccaccttccctcccaaagtactgggattacaggcattagccactgtgcccagccgaggctgtcatttttaaccggctctggatgactctgatgcagccatcctggaccttggctgtggtctggtaactggaacccagtgacgtaatcaggtgccatcgggggtcatgggaaagggggatccccaaggtctgaggtggactaggaaggctttctgaagaacctgggtctgttagggcatcagccaatcaaggtacaagtaaatagaggcaaaatgagggtttgaactgtgagcagttggtcctggaaaagaaagaaaccaagagattatggggactcaatgggcttcttaagagagaataagttgaaatcaatgaccagaagaccctgatggaagtggaggagaatcatctcaggcaaactttttgtgtgccagtaacagaaaccctctttgtgtgatcacatgcaaagtataggatatttgcaatatagccatggggaggagtgcagggcccaagggtagattttagccaggcctcccaggaacagaactcggatccgaaaagcccagagaagctagagctgcccctccaacactctcggatccacatggtctgtgttctctagacccccctgcatgttagcggtgttctctctctgtggactgactgtccttctcagtgaacatgtccacccgacagctcctgagtttatatcatctcaaccctcacaacccacagaggctgtgtctcctagtcacagctttaaattactggaaaaataaatgactggccaaacttggagcaggtgtccatcccagccctgtgtagttagagcaggaatcaagatctcaacacaaatgtggctgccaagcactcagccccggggcgaggggtcaagttcttctcagagaaagaggaataagttggttctcagaagacatcacaagatacgtgtgtacccaacaatctctgatctctgctgatcttttgcttagacgttaacttgatgcatcattggaaaggtgtttctctcatctctgtcctaaggcttgataaagtcattaaaattgtgttcttttgactaaaaaaaaaaaaaaaggaaaaaaaaaaaaaaaaaaaaa

SEQ ID NO: 7325 - DNA, 646 bp, Homo sapiens
ttttttttttggtccacaatcctccactctcaccccccatttcatcagaagtgagctcttccaatttactgaacattggaaaaaatcgaggagggcagtggttagcatggccaggggcaaggcaggagagaagcagcaaggaacacatacagatggttgaaaataaaagtttcagttatggaatttccgatcaagaggtaaatacatatctcagcagccagggaggtaaatttgtaccaagagataatttgactgagaagtttaagctgacttttccaggtcaagaaaagaatcaagaagaagtgagggaagataaagctacatttattctactattgagttggaaggagccttaaagatcctcggttcaaatgaggaaaccaagtcacagaaaatgcaaacgacttatgcaaagtcacacagagttaatagtagacctgggactaaaattcaggtctaactcttatcccttgtttccacttctacttcctacttgccactgctcatttggcagtgaggggagatttcccaaattataagtggtttcactgtgtctttcttaccaggccgaaggtactcttgccccaaaggacgcctcctctgagtatgcttttccgacgggcccgccctatttatgaattggagg

SEQ ID NO: 7326 - DNA, 1944 bp, Homo sapiens
tgctacaaccccgggcaggaagagctcgtcgcggtagcagcggtcgaaggggaccaagctccagagggcgggcgcccgagccgtgcggggagcgggcggggcagccatgctcctgtctgggggcgatccttctcctgctccccttacacgccaacctatgcccacctggcagccgtggcctgcggcctggagcgctttggccagtccccactcccagtggttttcctcactcactgcaactggatcttcagcctcctgtgggagctcctgcccctctggagggctcggggcttcctctcctctgatggggctccactccctcacccaagcctgctctcctacattatatccctcacctctggcctctcatcccttccgtttatctaccgaacctcctaccggggctctctgtttgctgtgacagtggacaccctggccaagcagggtgcccaggggggtgggcagtggtggagtttgccaaaggatgtgccagcccctacagtgagtccccatgccatgggcaaggggcccaatttgctggcattacagctgagtgacagcaccctggccgacatcattgccaggctgcaggctgggcagaaactgtctggctcctcaccgtttagttctgcctttaactcactcagcctcgacaaggagagtggcctgcttatgttcaagggagataagaagcccagggtctgggtagtcccgacgcaactccggagggatctgattttctctgtgcatgacattcccttgggggcccaccagaggcccgaagagacctacaagaagttgcgtttgctggggtggtggcctgggatgcaggagcatgtgaaagattactgcaggagctgcttgttctgcatcccccgaaatctcataggcagcgagttgaaggttattgagtccccggcctctgttttaagggggcagggcgtctgcaacaggagtggcacacggtgaagtgctggcatggctctacctcccaacccctcccaaccccatcccaaagcctacagtcctctgctccttctacctccactgtatcctgcatcccagaccctacagattgtgtgattgcttcatctgtatcaccccccgagtcctgtggacctgccttctgtgtagagcaaaacccaggctccctcacagccattctttgcagagatcacccttgcagtgagtgtgagttccttccaggtgtgtgcgcgtacactcaccctctgaattgctgccgctgccaaggaagtgggctccaggtgaaggccagtgccacgtcactctggctggccttcttagtagtttcatttctccggaagctgagccagtctcctggtctagcccaggttgccagaacgcttggcattgcagagtgctagagccagtggagaacttgccaacttgattgttttacagcagaggaaagaggatcacagagggaaaatgattcacccaaagtcacacagcaagttcatggctgagctgagaccaggattaagcttcctgactcccagttcaccatgaaaagggttctggcaacaggttcaagctggagaacccttcaaaaatgctacacccacattctctccaactcttcatctccctgatcttccagacaaactacctggatgttgcccttaaaccatttctagctgttaaccctatccagaaaaatgattgagtgatagctgagaagtggaaagtgtgggatttttggcaggtgctctctttcctccgccccccgcgccatcctttctcttcctcctctctgtaatggtatgtccagcctcactctccctccctggtgctgtatgcgttccccctgttagctacatttgtgatcacatacccttcttttaagtgaatttttttcatttgatttgtcaataaacgaatcaaactggaaaaaaaaaaaaaaaaaaaaaaaaaaaaaaaaaa

SEQ ID NO: 7327 - DNA, 7275 bp, Homo sapiens
  misc_feature (3372)..(3415): n is a, c, g, or t
  misc_feature (3641)..(3689): n is a, c, g, or t
  misc_feature (4726)..(4762): n is a, c, g, or t
gcgggtagatcttgggccgggcagcagcagtcgcagagcggcgcggcggcggtggcggcagcaggcagcaggcatgaccatggcagcggcggcggtggtggcacgcggggccggggcgagggcagcgacagcggcggctttgcggggtggctgcgggaccgcggctcgggggcggccgtgtgcgggccccgcccggcccttgtgcactgcacccgggaccgccccggacatgaagcgctacctgtgggagcgctacccgggaggcgaagagaagcacagaagaattggttccttccattatgagcaacttgttgaatccagatgccattttctcaaacaatgaaatgagcctgtcagacattgaaatctatggcttcgattatgattacaccttggtgttttattcaaagcacctccacacgctgatatttaatgctgcacgggaccttctcatcaatgaacaccggtatccagcagaaatcaggaagtatgagtatgacccaaattttgcaattcgtggacttcattatgatgtacagcgggcagtattaatgaagatcgatgcttttcattatatccagctgggaactgtctacagaggcctcagtgttgtccctgatgaagaagtcattgaaatgtacgaggggtcccacgtgcccttggagcagatgagtgacttttacggaaagagctctcatggaaacacgatgaagcagttcatggacatcttctccctgcccgagatgaccctcctgtcctgcgtgaatgaatacttcctcaagaacaacatcgactatgagcctgtgcatctgtacaaagatgtcaaggattcaattcgagacgtccacatcaaaggaataatgtacagagcaattgaagcagacattgaaaagtacatctgctatgctgagcagacccgcgcagtgttggccaaactggctgatcatggcaagaagatgtttctcatcaccaatagccccagtagctttgtggacaaagggatgagttatatcgttgggaaagactggagggacctgttcgatgtggtcattgttcaggctgagaagccaaacttctttaatgataagcggaggcctttccgaaagatgaatgagaaaggtgtcttactctgggataaaatccataagttgcagaaaggccagatatacaagcagggtaatttatatgaatttttgaagcttactggatggagaggatccagagtgttgtattttggtgaccatatatacagtgacctggcggatttgaccctaaagcatggctggaggactggtgcaatcatcccagagttgagatctgagctcaaaatcatgaacacggagcaatacattcaaaccatgacctggctgcagaccttgactggcttattggaacagatgcaggttcacagagatgctgagtcacagctggttttgcaggagtggaaaaaggaaaggaaggagatgcgagaaatgaccaagagtttcttcaatgcccagtttggaagcctgttccgcacagaccagaacccaacctacttcctaaggcgcctgtcgcgcttcgctgacatctacatggcgtctctgagctgcctcctgaactatgacgtcagccacactttctacccccggaggactccactgcagcacgaactgcccgcctggtcagaaaggccccccaccttcggaacccctctcctgcaggaggcccaggccaagtagccaagggcaaaaactagaaactgtaactgcccctgattgggcaggcatgatggggttgacttcatgtgggtctgagtgttgcttttggaaaagatacagataagccttttgatatttattttgtaccttacggagaataattctcccaatgattaagacaggagctagcagcccacccctccagcctttccccccatgcagggctgaaaggcaagcttcacattggaactctgattttgcctttttgtttactgaggtcctggaacatcaggtttcctgggataggtagaccacttgatgccatgtctgtattctagcaggtcaagcttgaaaccgttcttgactcctccatggaacatttcctgaacatttacgggctatgcattgggaactgcaggggcacagtgatgggcaaagattagctgcttccagaaggctgatttcgtgggctccacaatggtaaaacgctgctgtgagtggcagagaggttccccaggtgatggccagttcccaaatcatttggtactaaggctttgacattctggcacatcacatcaaatagaacacagcctccctggaaggacttaagtgagaaagaacaagagaagctgcaactcctggacccttttgtcctcagtgtgtggttcctgcgtccttccccagggcaggagagaggagatgagagctctggtcaaaacctgccagctagtggaacagccttctatagagccttctgcaagaaacgagtgggtttgaagaaccaaaacatttgtggtaggtctcccaggagcttgttaaacctggaaacaccacctgagttggtttcatctgctcattggaagaaagaaaatgaaccaggaaaaagcatctttgtcatgaaatgctatgccatgccacccacccagttgaattggaatcctgttaaaacatgagatttaccagaaacagtcctttgtctagatggaaacaaacaagatcctggcttctctctaatgagttaccaactgagaggtgcttggattggccaggggaggaggaagatggccaccacaacttagccatgtccagccttctcttagatttcactcctgtgatgtttgtgcgactatttgggagtttgtatagtttgtttttttttttttgttttgttttgtttttttttagatgtctaagatgggaaagggcgaaggacattgaagctaaggaatagatatgacctagctaaccaagcttttctcatttctttctgttttgttttgttgagatggagttttgctcttattgcccaggctggagtgcagtggcacaatctcagctcactgcaacctctgcctcccgggttcaagcgattctcctgcctcagcctcccaagtagctgggattacaggcatgcactaccacacccagctaattttgtatttctagtagagatggggtttctccatggtggtcaggctggtctcgaactcctgacctcagataatctgcccgccttggcctcccaaattgctgggattacaggtgtgagccaccgcacctggcctgcttttttcatttctttctaggggcaatgcaagtggcatgtattccttttgttggagggaagaatccttaattgcacctggatttgtagtatccttcaatgtaaagnnnnnnnnnnnnnnnnnnnnnnnnnnnnnnnnnnnnnnnnnnnngttattagttatggggctgctaatactgttttaattgcatatgctatatcaatacttctgttcagattagcctgatctagtattgctaaaactcattttaagcttttgcggtaacttgtatatattcttaaatctaaaggatggcaggaacatgaggggagcttgtggagagtgcttgcttattcaacatttttattgtgataaatgtatgtaaccatctattgannnnnnnnnnnnnnnnnnnnnnnnnnnnnnnnnnnnnnnnnnnnnnnnncttaatgagttatatagcatcctttgtaatgctgcttgttatagttggaatgtacttgtgatatttggctgtatttaactataatggtgaaggtgaccctttagatccaataaggcttctccccatcttttcttctacattttgttatgaacacagtaaggcacagtagtatgttctttttttggaacagggtaggcattttgtttattgtttgcttgcttctaggtgttttcgccatcagggtgtattggaggctgacacttaatgggtgtgtgttacgcccagaactgctcggtgtcggggttctaaaagaatgcgctggtgttcttggcttcaagtttctgctttggagaagcagattcaggaagtaggtgttgcttaaaaataattcttggtttttatctaatcagatattcattgattacctaccaggtgccagttatagggtgttttgtttactcaagaatgaagtagaactatttttaaaacctgtttccatgagtgttcacgttaggtgacctaagctttgaaggagaaaaacattttctgggtatgaataatgagttttgtaatcaattcccagttagaagaatttcagtctctgggccattgagcttggcagtgttgagatctcccatgtgacagaagcctggcatctgggccaccaaggctcactgactgtgtaccttgcagactgtagacccatgtcgtggcggtaacggggccaaacacagtcattcccatgtgaacgatggaggcacatcccactttattattaatccttgtatatactcagtcaggacagattttaacttgtcgctgtcatgactttttttttttttttttgaggcaaggtctcgctctgttgcccattctggagtgcagtggtgtgatctcggctcactgcaacctcttgcctcccaggttcaagcaattttcgtgcctcagcctcccgagtagctgggactactggtacatgccaccaggcctggccaagttttgtagttttaatagagatggggtttcaccatgttggnnnnnnnnnnnnnnnnnnnnnnnnnnnnnnnnnnnnncccacctcagccttccaaagtgctgggattctgggtgtgagccactgtcatgcctggcctcgtcatgactcttttctctttttttttttttttttttttgagatttagttttgctctttttgcccaggccggagtgcaatggcacgatcttggctcactccaacctccgcctcctgggttcaagtgattctcctgcctcagcctcccgagtagctgggattacaggtgcccaccaccacatccagctaatttttttgtatttttagtagagacggggtttcaccatgttggccaggctggtctcgaactcctgaccttgggtaatccacctgccttggcctcccaaggtgctgggattacaggcatgagccaccgtgcccagcctatcatgactcaactgggatctggcacactgcactgggtgttttgttctctgatgtgcacattgatgaatgcatattggtacaagggaaacgaatctgttttcagccatttaaaaaattgtgttgtaaagcaaacaaaaatagcttgaacatttaaaaattactgtttaatattgtttgactgattttctaagaattatgtgaacaatgatgagtccagggcagcagccatcacaaatatgacagtccagcaaggcccatggaggtccctttggaagggacttgcacagctgattttctttttccagtgttgtttttacgggtgaaacgtggcttttgaaatactttagttgtttggcttagagctcccactttccccctaacatagtgcctgtctgttttttaaaacattttacccttcggcactattttctgctattcccattaatattatgtaacataaaccacttgctactgatttgggcatattacagactacaattactagttgctttgaatgcattggcactcttaattattgcaaaggagaattgaaaagtagtcttgtggtcctagttaatttagctttgggcaaactaagtggcttttcttctgtcctcttctcaaaaggccttttaagcagcagagactgggctaaatactggaactgaattccacttttctgcctgctcatttgctgccaaagaccacttggggctccttgtctagaatgctctaagacgaaatttggccagacacagggttccttgattgttctgttcaactaatagagaacctacattttgccttcttaatatcgactttcttttgtaccaggtttttctttctttcttttttgccttaggagcttagctcaaaagttcaagctaacctttgacactactagtgtcatttagtaacagtaatctttgacactactagtgtcatttaggagcttaagctcaaagttcagctaacctttgacactgctagtgcgttcaagaaagggtagggaatgaagtacccttaatgcagggtcagcaaacttttcctgtaaaaggccagataggaagtatttttggctttttgggctgtttgcttttgctactactactgtgggaatgaccatggtcatggctgtgttccagcacaacttgatttaccaagacaagctgtgggctgtatttggtcctcaggctgtggcttgctagcccctgctctaatggattgtgttggcggcaatggcaagattcccttgctgagaacatgcagatgaataaccttatagctgggatgcagagaggagaaagttctgtaggtaataagtgcactgtattccctctgagctacttcctgggcatagttacatgtatggccagtgtgtgtacttgagccatcaggctcagacacttgttgaatatacctctcattgcattagtttgtaattgtgctagtgctgggtgctgagctcagctgcccggatgacctttccagactgaaggacatactcccctaacagctgggagtgctgctggctggccatttacttccagcccttatgaggagtttcccctgctgaagagccctgcctgccccagatcatacccccttcctgcctgtaacccttaccggctccatatggggtacaaaggtctggcctcctcaccccaacttgggaaaccctctggggccatcccagctccagagccccttgtggggtcagtgagacctcattgtggccacattacagcccagtgcctctccctgacaagcctgtacccagccggctcagcccacagcactgtcctatgaaccttcctgcacgccattctccacctcagtatctgctttcggggaacccaacctgcgacagtgcttctgtgtgttttcagtcctgcaggtttgaactctgactttggagacttttccagttatctcgtggaatgacagattgtgcctgtatgatatcaggcacaattaatgcaaattaggcagacctatttattctagatgtgaatttgctatttattttaaatgttgattttatgtgttatgtgactctgaacttattgccaaataaaagtttgaattgtaaaaaaaaaaaaaaaaaaaaaaaaaaaaaaaaaaaaa

SEQ ID NO: 7328 - DNA, 1889 bp, Homo sapiens
tttttttttttttttttttttttttttttttgtttttcagagattttattaagaataaggcatatgacagtcacccctaaagcacagggctctatttctgtgggtgagtgaatacactctgaaaagcattggatacaaaagcgcagccaacagagaatttggagcagggtccctctgccctgccacagggctcctgccaggtgggtttgaagccctgcacatcccccattcaaggctggcatgtccaggagaaggtgcttggagacccccggctccccgcgcttcgaagctgccccacaccctctaggcctccttcctctctccaccaggggggacgccatcctactgcttatatggggaagggttatcccattttggccctggactagtcccccaagctagagggtgctgtggctgagctgtgggggccaggggtacagagcctcaaaccgcactgcccagtgctccctggctgatttccaaagcagggggaggtccccacctgcagctctgtgtcctggagctgtccatacttggggtgtggcaggagctccgcctagggacctgagtgtcctcttcaacactctctctcccaatggggattcgtgcagcagaggagagagaaatgcagtcctttcccttcttagtcaccaagatattccaggggccaggagcgcgtgggggtgcgaggtttccctttggccaggtgggctctcaagccagacccagggagggtggggcctctccagggccctgaggctgaggagagttgggcccctgtggccaagagcgggccatgcactccagctcccagtctcgttctgctgcacagagggttctgtgcaggcgggtggaggggtttccattatttccaggagggcgaggaggggaatttctgtgaaaactggaaccctgtatctgctacaggtgctcccccagcttgccttatttcctttcccaggcacctccagcacctcagctgagagtcagtgagtcagctgccccagcacccagaacctttcatctaggggatctccaagcacctcacaaacaattgtcattatctgtggttgctggaagagggatgggagttgggtggagctgatggggtcacttcgggagaagcaggcaggccactggaagatccctgggaccagagtgcggtgggggcccctagctggacaccctggatgcccaggagggaagggggaagggggctattgctatagagctggggggaggccaggcggacggagctatggcttttagtgggtgggtgggcagatagagtacttcaccatctctgcagaagaatcgacctaacaaagtcaccctgttcaccccaaaagtgtggtcgtgggagatgagggtctgtgcacgctcctctggaaagagactttgcccttcttcccacagtcctctgggcacctccgagagaggagtgaggccctcacacacaagacaggttctgaaagggagggggacagaataggggtgcagtgagtacacacacttgaggggggacagagatggtacaggcgcaaccacaggactagtagagagtaagaggtgggggcaggcagagcaagaccccaggccaccttcttggcccaagttggactggagagcactgtcccaagggtgccccaacctcagccatctgcatcccaggagctggacaccccagaccaggcgtggttattgctcagtggtcttgggcagtcccgagtggcgtcagctgggagagccgcacattgcttggccctgagtgcgctcgctcactggtttctacttcttgccaatttcctgctccaacaaatggagagaaagggggtgtgatctgggactcccccttcttcatggggctgtgatgggagaagagctcgtca

SEQ ID NO: 7329 - DNA, 5599 bp, Homo sapiens
  misc_feature (137)..(199): n is a, c, g, or t
  misc_feature (2484)..(2501): n is a, c, g, or t
cgaggggggaggcggattcggcgggagccgcgcgaggagccgccgccgccgcgccatggagcccgagtgagcgcggcgcgggcccgtccggccgccggacaacatggaggcagcgccgcccgggccgccgtggccgnnnnnnnnnnnnnnnnnnnnnnnnnnnnnnnnnnnnnnnnnnnnnnnnnnnnnnnnnnnnnnngccgctcctgctatttgccaaccgccgggacgtacggctggtggacgccggcggagtcaagctggagtccaccatcgtggtcagcggcctggaggatgcggccgcagtggacttccagttttccaagggagccgtgtactggacagacgtgagcgaggaggccatcaagcagacctacctgaaccagacgggggccgccgtgcagaacgtggtcatctccggcctggtctctcccgacggcctcgcctgcgactgggtgggcaagaagctgtactggacggactcagagaccaaccgcatcgaggtggccaacctcaatggcacatcccggaaggtgctcttctggcaggaccttgaccagccgagggccatcgccttggaccccgctcacgggtacatgtactggacagactggggtgagacgccccggattgagcgggcagggatggatggcagcacccggaagatcattgtggactcggacatttactggcccaatggactgaccatcgacctggaggagcagaagctctactgggctgacgccaagctcagcttcatccaccgtgccaacctggacggctcgttccggcagaaggtggtggagggcagcctgacgcaccccttcgccctgacgctctccggggacactctgtactggacagactggcagacccgctccatccatgcctgcaacaagcgcactggggggaagaggaaggagatcctgagtgccctctactcacccatggacatccaggtgctgagccaggagcggcagcctttcttccacactcgctgtgaggaggacaatggcggctgctcccacctgtgcctgctgtccccaagcgagcctttctacacatgcgcctgccccacgggtgtgcagctgcaggacaacggcaggacgtgtaaggcaggagccgaggaggtgctgctgctggcccggcggacggacctacggaggatctcgctggacacgccggacttcaccgacatcgtgctgcaggtggacgacatccggcacgccattgccatcgactacgacccgctagagggctatgtctactggacagatgacgaggtgcgggccatccgcagggcgtacctggacgggtctggggcgcagacgctggtcaacaccgagatcaacgaccccgatggcatcgcggtcgactgggtggcccgaaacctctactggaccgacacgggcacggaccgcatcgaggtgacgcgcctcaacggcacctcccgcaagatcctggtgtcggaggacctggacgagccccgagccatcgcactgcaccccgtgatgggcctcatgtactggacagactggggagagaaccctaaaatcgagtgtgccaacttggatgggcaggagcggcgtgtgctggtcaatgcctccctcgggtggcccaacggcctggccctggacctgcaggaggggaagctctactggggagacgccaagacagacaagatcgaggtgatcaatgttgatgggacgaagaggcggaccctcctggaggacaagctcccgcacattttcgggttcacgctgctgggggacttcatctactggactgactggcagcgccgcagcatcgagcgggtgcacaaggtcaaggccagccgggacgtcatcattgaccagctgcccgacctgatggggctcaaagctgtgaatgtggccaaggtcgtcggaaccaacccgtgtgcggacaggaacggggggtgcagccacctgtgcttcttcacaccccacgcaacccggtgtggctgccccatcggcctggagctgctgagtgacatgaagacctgcatcgtgcctgaggccttcttggtcttcaccagcagagccgccatccacaggatctccctcgagaccaataacaacgacgtggccatcccgctcacgggcgtcaaggaggcctcagccctggactttgatgtgtccaacaaccacatctactggacagacgtcagcctgaagaccatcagccgcgccttcatgaacgggagctcggtggagcacgtggtggagtttggccttgactaccccgagggcatggccgttgactggatgggcaagaacctctactgggccgacactgggaccaacagaatcgaagtggcgcggctggacgggcagttccggcaagtcctcgtgtggagggacttggacaacccgaggtcgctggccctggatcccaccaagggctacatctactggaccgagtggggcggcaagccgaggatcgtgcgggccttcatggacgggnnnnnnnnnnnnnnnnnngtggacaaggtgggccgggccaacgacctcaccattgactacgctgaccagcgcctctactggaccgacctggacaccaacatgatcgagtcgtccaacatgctgggtcaggagcgggtcgtgattgccgacgatctcccgcacccgttcggtctgacgcagtacagcgattatatctactggacagactggaatctgcacagcattgagcgggccgacaagactagcggccggaaccgcaccctcatccagggccacctggacttcgtgatggacatcctggtgttccactcctcccgccaggatggcctcaatgactgtatgcacaacaacgggcagtgtgggcagctgtgccttgccatccccggcggccaccgctgcggctgcgcctcacactacaccctggaccccagcagccgcaactgcagcccgcccaccaccttcttgctgttcagccagaaatctgccatcagtcggatgatcccggacgaccagcacagcccggatctcatcctgcccctgcatggactgaggaacgtcaaagccatcgactatgacccactggacaagttcatctactgggtggatgggcgccagaacatcaagcgagccaaggacgacgggacccagccctttgttttgacctctctgagccaaggccaaaacccagacaggcagccccacgacctcagcatcgacatctacagccggacactgttctggacgtgcgaggccaccaataccatcaacgtccacaggctgagcggggaagccatgggggtggtgctgcgtggggaccgcgacaagcccagggccatcgtcgtcaacgcggagcgagggtacctgtacttcaccaacatgcaggaccgggcagccaagatcgaacgcgcagccctggacggcaccgagcgcgaggtcctcttcaccaccggcctcatccgccctgtggccctggtggtagacaacacactgggcaagctgttctgggtggacgcggacctgaagcgcattgagagctgtgacctgtcaggggccaaccgcctgaccctggaggacgccaacatcgtgcagcctctgggcctgaccatccttggcaagcatctctactggatcgaccgccagcagcagatgatcgagcgtgtggagaagaccaccggggacaagcggactcgcatccagggccgtgtcgcccacctcactggcatccatgcagtggaggaagtcagcctggaggagttctcagcccacccatgtgcccgtgacaatggtggctgctcccacatctgtattgccaagggtgatgggacaccaccggtgtgctcatgcccagtccacctcgtgctcctgcagaacctgctgacctgtggagagccgcccacctgctccccggaccagtttgcatgtgccacaggggagatcgactgtatccccggggcctggcgctgtgacggctttcccgagtgcgatgaccagagcgacgaggagggctgccccgtgtgctccgccgcccagttcccctgcgcgcggggtcagtgtgtggacctgcgcctgcgctgcgacggcgaggcagactgtcaggaccgctcagacgaggcggactgtgacgccatctgcctgcccaaccagttccggtgtgcgagcggccagtgtgtcctcatcaaacagcagtgcgactccttccccgactgtatcgacggctccgacgagctcatgtgtgaaatcaccaagccgccctcagacgacagcccggcccacagcagtgccatcgggcccgtcattggcatcatcctctctctcttcgtcatgggtggtgtctattttgtgtgccagcgcgtggtgtgccagcgctatgcgggggccaacgggcccttcccgcacgagtatgtcagcgggaccccgcacgtgcccctcaatttcatagccccgggcggttcccagcatggccccttcacaggcatcgcatgcggaaagtccatgatgagctccgtgagcctgatggggggccggggcggggtgcccctctacgaccggaaccacgtcacaggggcctcgtccagcagctcgtccagcacgaaggccacgctgtacccgccgatcctgaacccgccgccctccccggccacggacccctccctgtacaacatggacatgttctactcttcaaacattccggccactgcgagaccgtacaggccctacatcattcgaggaatggcgcccccgacgacgccctgcagcaccgacgtgtgtgacagcgactacagcgccagccgctggaaggccagcaagtactacctggatttgaactcggactcagacccctatccacccccacccacgccccacagccagtacctgtcggcggaggacagctgcccgccctcgcccgccaccgagaggagctacttccatctcttcccgccccctccgtccccctgcacggactcatcctgacctcggccgggccactctggcttctctgtgcccctgtaaatagttttaaatatgaacaaagaaaaaaatatattttatgatttaaaaaataaatataattgggattttaaaaacatgagaaatgtgaactgtgatggggtgggcagggctgggagaactttgtacagtggaacaaatatttataaacttaattttgtaaaacagaaaaaaaaaaaaaagacgcactcccgggcattcatggccgggagcgcgaaaaaaacgcaattgaaacgggcccttgggccaaacggtggttttccgcacccaaatttttttgggccaaaaggggaaaaaagctggcccgtttcccccctagaaggggggtcgggctttaattgtcccacacaacccgaggcgataaccatgccgattacaatgaatctcgggctcgaaattcacccctacgagagaatttagcccgtgcctctaatgggctcacggcggccttctttcaggggagaatcccacgaagattaagtgcacaggaataccagccgattattatctaggaaatcaaactctgtcctgcctgtgcgtatacacaacacgactccggaccccaaagcccatcctacggtgttacattgatccggatctcactcgat

SEQ ID NO: 7330 - DNA, 2462 bp, Homo sapiens
gaagcgaaggaggagtgtgtgcggcggggccggcggcgggtaaaggcgagaaggctgcaggagaccgaggggtcgctcgctcctccttcgcttcgcctcgccgccgccatgcaggaaatcatcgccagcgtggaccacatcaagtttgacttggagatcgcggtggagcagcagctgggggcgcagccgctgcccttccccggcatggacaagtcgggcgctgctgtctgtgaattctttttgaaagctgcctgcggcaaagggggcatgtgtccgtttcgccacatcagtggtgagaagacagttgtgtgcaaacactggctgcgtggcctatgcaagaaaggggaccagtgtgagttcctgcatgagtatgacatgaccaagatgcccgagtgctacttctactccaagttcggggagtgcagcaacaaggaatgtcccttcctgcacatcgaccccgagtccaagatcaaggactgtccttggtatgaccgcggcttctgcaagcacggtcccctctgcaggcaccggcacacacggagagtcatctgtgtgaattacctcgtgggattctgcccggaggggccctcgtgtaaattcatgcaccctcgatttgaactgcccatgggaaccaccgagcagcccccactgccacagcagacacagcctccagcaaagcaaagtaacaatccgccattacaaaggtcgtcctccttgatccagttaacgagtcagaactcttctcccaatcagcagagaaccccgcaggtcatcggggtcatgcagagtcaaaacagcagcgcgggcaaccggggaccccggccactggagcaggtcacctgttacaagtgtggcgagaaaggacactacgccaacagatgcaccaaagggcacttggcctttctcagtggacagtgacagcagctggagccagctccgagcagcccgggggccccgctgttgggagtgtgcatttaactgtttcatgcgcttgttggcgcgactgtggctcgagctggcccgcagacacgtgggtttcatcactctgaggggccacgtctgttagtttcctatcattttgccgtagtattttttgaaaaagggacatgtgtcctgtgggtccctgcagtcgacatcatgtttggctgggcatcgatgcctcctttctgggactcccggcacaactcccctcatccagggagggaggcagctgctggggaggggcttggctaggtagttctgtgtggcggtggtcattcccctcattaaacaccagttcttggtgacgccaggggctggtaggtcattcaaagctgtggccagctcacgcctgcttcctccctccctgccctgctgaatcctaaagctgtgcctatatctgtgatttgaatgagggagccctttggggcaaattcaggtgcccccattgcctcaggctggccctggtcccaggtggcagcggttgaggaggggtacagggctctcaagcctgaggttttcttctctgggcttaattttctcttggggtacgtgcctgacagtgtttaaggtgtccgttgaactggagttgcagacttttaaatagatgaccccttcagatcatctgtgcctacctcctgcccatcaggcgtctacactgtcactcagacacctgtggcatgtggaggagactgccctgtcctgagcctggaaaatgtgaaactgtctcctgcaacctgctgggcatgtgggcctggctgtgttcaattgcaagaacaatttttatgaaatggattaaagcttgttttttaaaaaaaaaaaaaaaaaacattaataacgaagagcggagggccgggtccagaagagatgtcccctctgaaagtggggccccacggactctaaccgtcttaacccacggttttttccgttcgtcacgaaccggtggtcccctgttagattagaaagcttcgcttattcaattaggatgccttcagcgcccactttcgagtcccagtaccgggtattgcacacaagcgctacagttggaaacgtgaggataaacacccgtgcacataagacctcgggggagacccctcccggagtacataggggcacatccctctcacccagtccattgaaagagctagaggcatcaacttgactttctgtgaacatacattttaaacgcctcaccgtactacttttctaaaagccttcggcaacgggcaataccattggccttacacaagtttggaaagagacccgggtccatcaaacgggattgctcaagaactctgtaagccttgggcataatcggctttccgcttgacgtcaggagacagattagggtccccaacggcagggtaagtgcacttctcgtgacagaaccctttttactatcctcaggactacgggcgcaaaaaaaacgggtcatccccccgtctacactttaacgggaccacacaactatcacgcacacaaca

SEQ ID NO: 7331 - DNA, 1105 bp, Homo sapiens
cccgctttgggccgcctctctggtttgtgcgcccgtcgcaggtcgcaggcctctttgtcagctggagttgcgcgggctgacgcgccactatgtagcgggtttcgggcgggccacgcgtgcgggacaggaacccaaccccagccgaccttgagctccaggagttcgtctcttacgtctgcggaagtgcagctgcctcagttcttagcgcaggttgacaactacaggcacaagccattgaagctggaatgtcctgttgctggtatttcaattgacttaagccaactatcccttcagttacaataggaaagtgcctctaataaggccaaatatgcgtactaacttgtagcaaccacgtgtccgtgcagtgccacaggagctagagcagtgacaatgctggtggcaacagggcagtgtagcaggtgcttcatgttcaccttttcaaccttttcatttaattgtcacaactcggaggtggattctgttagggacaggctgccccaggaccactccgcccccgctaactcaatgcagctgacccttaccctgaatactctgcagctgcattcctgaaccgttatctaggcgctatagcaaggtcaccagacttgctacaccgaagccctctgggtggcacgggggaggtcatgagaaacgtggattacacccccttgtaaattcctattttcacaagataatatattgtaagccggtcatgagattatatgtggtaaagttaattgactaacaaccccagggtctctctcccccatataaacccctcattttgtaagctcagggctgccacctccgactggtggagaagcctggcaggttaataaacttacttggcctgaaaaaaaaaaaaaaaaaaaaatagataacatttacctgcaaatttacaactaacacccccgatccctacgattgggggcgggcccgcctctaagaagaatcccccctagagagggccccagatttttaacgcgttacccccagttttttttctggtaacagagagggggccctctataaggggggaggccgatatattataaactttagggccacttgggccgcctctttttttatcaacccctgcggagga

SEQ ID NO: 7332 - DNA, 3897 bp, Homo sapiens
  misc_feature (3379)..(3380): n is a, c, g, or t
  misc_feature (3386)..(3387): n is a, c, g, or t
  misc_feature (3390)..(3390): n is a, c, g, or t
  misc_feature (3393)..(3393): n is a, c, g, or t
  misc_feature (3404)..(3406): n is a, c, g, or t
gacatagctgccctaaaaggaatgaggaagcgagagctctccagtgtctggctggctccgtccgtgtgacagcccatgatgttctttccggtctctgtaatattctgaatttccacctgcccgccccttcgcttataatgcagagcatgtgaagggagaccggctcggtctctctctctcccagtggactagaaggagcagagagttatgctgtttctcccattctttacatgttcaccggatgtaaaagaactctggctagagaccctccaaggacagaggcacagccacacgggagtgaaatccacccctggacagtcagccgcaatactgatgaagctgagaagcagccacaatgcttcaaaaacactaaacgccaataatatggagacactaatcgaatgtcaatcagagggtgatatcaaggaacatcccctgttggcatcatgtgagagtgaagacagtatttgccagctcattgaagttaagaagagaaagaaggtgctgtcctggccctttctcatgagaaggctctcccctgcatcagatttttctggggctttggagacagacttgaaagcatcgctatttgatcagcccttgtcaattatctgcggtgacagtgacacactccccagacccatccaggacattctcactattctatgccttaaaggcccttcaacggaagggatattcaggagagcagccaacgagaaagcccgtaaggagctgaaggaggagctcaactctggggatgcggtggatctggagaggctccccgtgcacctcctcgctgtggtctttaaggacttcctcagaagtatcccccggaagctactttcaagcgacctctttgaggagtggatgggtgctctggagatgcaggacgaggaggacagaatcgaggccctgaaacaggttgcagataagctcccccggcccaacctcctgctactcaagcacttggtctatgtgctgcacctcatcagcaagaactctgaggtgaacaggatggactccagcaatctggccatctgcattggacccaacatgctcaccctggagaatgaccagagcctgtcatttgaagcccagaaggacctgaacaacaaggtgaagacactggtggaattcctcattgataactgctttgaaatatttggggagaacattccagtgcattccagtatcacttctgatgactccctggagcacactgacagttcagatgtgtcgaccctgcagaatgactcagcctacgacagcaacgaccctgatgtggaatccaacagcagcagtggcatcagctctcccagcaggcagccccaggtgcccatggccacagctgctggcttggatagcgcgggcccacaggatgcccgagaggtcagcccagagcccattgtgagcaccgtggccaggctgaaaagctccctcgcacagcccgataggagatactcagagcccagcatgccatcctcccaggagtgcctcgagagccgggtgacaaaccaaacactaacaaagagtgaaggggacttccccgtgccccgggtaggctctcgtttggaaagtgaggaggctgaagacccatttccagaggaggtcttccctgcagtgcaaggcaaaaccaagaggccggtggacctgaagatcaagaacttggccccgggttcggtgctcccgcgggcactggttctcaaagccttctccagcagctcgctggacgcgtcctctgacagctcgcccgtggcttctccttccagtcccaaaagaaatttcttcagcagacatcagtctttcaccacaaagacagagaaaggcaagcccagccgagaaattaaaaagcactccatgtctttcacctttgcccctcacaaaaaagtgctgaccaaaaacctcagcgcgggctctgggaaatcgcaagactttaccagggaccacgtcccgaggggtgtcagaaaggaaagccagcttgccggccgaatcgtgcaggaaaatgggtgtgaaacccacaaccaaacagcccgcggcttctgcctgagaccccacgccctctcggtggatgatgtgttccagggagctgactgggagaggcctggaagcccaccctcttatgaagaggccatgcagggcccggcagccagactagtggcctccgagagccagaccgtggggagcatgacggtggggagcatgagggcgaggatgctggaggcgcactgcctcctaccccctcttccacctgctcaccacgtagaggactcaagacacaggggcagcaaagagccactccctggccacggactctctcccctgcctgagcgatggaaacagagcagaactgtccatgcttctggggactctctggggcacgtgtctggcccagggagacctgagctcctcccgctgaggaccgtctccgagtccgtgcagaggaataagcgggactgtctcgtgcgacgatgtagccagccggtctttgaggctgaccaattccaatatgccaaagaatcgtatatttaggagggaggccatacgccatgccatagcttgtgctatctgtaaatatgagacttgtaaagaactgcctgtagattgtttttaaaaggtcttgaataagctccttgagaaagttgtggaaagccctcctcagtgaggatagctacaccatggccatggcgcatcagatagtctctgtgtacctggatttgtgcaatatgtaaaaatgtatcaaatgtattatagataaggtgttaggtgcaaaggatgtctaataatccctgcacacgttttgaacttgcagtgaagtacactgctgttccttgcttcctggggcacttttctcttggttagtgtttaaaaattatcttcgcttttttaatgtggcctcaaatgtcatgccaattttcacatcttccacaaactccatttagggagaaatgtttaaatctctggtataagtttactccataccagagtaaactatatattactctatataagcagtcttgcaataactaatcaccaccatagaagaaagaaacagactgcaaggaacagagttgagtgtctggagtcatcaaaggcattaaaaactccagtaaaagctggggccgtagcaaaaatcatgaaaaacacttcaacgtgtcctttcaatcatccaattaaatgtgggtagattaatgaaaatgtattacatcaatattaactcatctatagcactttgagtatctttgtagttcatgatatcctatcctataatgtggaggtaaatgattttatatgcattgggggtcatatataaaacttcaatgtaatttcactacaataaattgccttccttatttgaaagtaaaaatgctcaaaatacatnngacacnnccnacncctcccccccnnnttaatagaaatccactaagaaaaccattcacatattggttcactcaacaagcatttattaaatatatattcactattctagactaatagcaagaccggggatcttgtttaggaagaagcagtccctgttctccagaatttgcaaaaccattaaaaaagcacctactttaagccattttttttcagcaaggagtcattctgccagaaaaatgtagtacacaaatacaggataatataacaaatgtaaaatttctcatttctagtgaattaaactttccagtaattttacatctcacctcattcttatgatgctcagtttgcttaattattggcaaacataatggtaaaatgtttgtactgtattagagctttactgttcgattattaagatatttatccagtatcttagagatgctggacttcaattttccttattttatctttttaaaataaaatatcatgcatgcttctgatttgttatagaaaaaaaaa

SEQ ID NO: 7333 - DNA, 7625 bp, Homo sapiens; identical to SEQ ID NO: 6188
  misc_feature (556)..(570): n is a, c, g, or t
  misc_feature (5867)..(5896): n is a, c, g, or t

SEQ ID NO: 7334 - DNA, 3186 bp, Homo sapiens
  misc_feature (96)..(166): n is a, c, g, or t
gggcttcccccatagaatttttcttttcattgcccactttactgttttggctccagactgtcgttaagaatgtacagcctaattctggtgtgtttnnnnnnnnnnnnnnnnnnnnnnnnnnnnnnnnnnnnnnnnnnnnnnnnnnnnnnnnnnnnnnnnnnnnnnntggtgctgtgaagtccattctttcctctgcaagactactgactatgcagaaatttatcgaagcggattattatgaactagactggtattatgaagaatgctcggatgttttatgtgctgaaagagttggccagatgactaagacatataatgacatagatgctgtcactcggcttcttgaggagaaagagcgggatttagaattggccgctcgcatcggccagtcgttgttgaagaagaacaagaccctaaccgagaggaacgagctgctggaggagcaggtggaacacatcagggaggaggtgtctcagctccggcatgagctgtccatgaaggatgagctgcttcagttctacaccagcgcagcggaggagagtgagcccgagtccgtttgctcaaccccgttgaagaggaatgagtcgtcctcctcagtccagaattactttcatttggattctcttcaaaagaagctgaaagaccttgaagaggagaatgttgtacttcgatccgaggccagccagctgaagacagagaccatcacctatgaggagaaggagcagcagctggtcaatgactgcgtgaaggagctgagggatgccaatgtccagattgctagtatctcagaggaactggccaagaagacggaagatgctgcccgccagcaagaggagatcacacacctgctatcgcaaatagttgatttgcagaaaaaggcaaaagcttgcgcagtggaaaatgaagaacttgtccagcatctgggggctgctaaggatgcccagcggcagctcacagccgagctgcgtgagctggaggacaagtacgcagagtgcatggagatgctgcatgaggcgcaggaggagctgaagaacctccggaacaaaaccatgcccaataccacgtctcggcgctaccactcactgggcctgtttcccatggattccttggcagcagagattgagggaacgatgcgcaaggagctgcagttggaagaggccgagtctccagacatcactcaccagaagcgtgtctttgagacagtaagaaacatcaaccaggttgtcaagcagagatctctgaccccttctcccatgaacatccccggctccaaccagtcctcggccatgaactccctcctgtccagctgcgtcagcaccccccggtccagcttctacggcagcgacataggcaacgtcgtcctcgacaacaagaccaacagcatcattctggaaacagaggcagccgacctgggaaacgatgagcggagtaagaagccggggacgccgggcacccccaggctcccacgacctggagacggcgctgaggcggctgtccctgcgccgggagaactacctctcggagaggaggttctttgaggaggagcaagagaggaagctccaggagctggcggagaagggcgagctgcgcagcggctccctcacacccactgagagcatcatgtccctgggcacgcactcccgcttctccgagttcaccggcttctctggcatgtccttcagcagccgctcctacctgcctgagaagctccagatcgtgaagccgctggaaggtgatcacgcggggcctcggcccctctctgtcctcctgggggactccctttggtccctgatccacctgcggaaggcggggcacctctgtcacgcctactcctttttcttccgcgacagccacccgcgctgctggtttgagttcctctgagggtggtgctcagcctaggcctccgtccctcccctctggctggcaggtgtgacaatgcacacataggccatgaaactcgccgaggaaagacaagcatgtgcactgtggtcttctagttctttcctttgcctttagaaccttagaaataaaaacttttgtggcggtagaggcactgctaactgattcaaaaattaattaggttttgcctgtgggtgtgaggaatgcagaaaattaatgctttagcttttctgcagttttggtgtcggggagaggttccaagcaaactctattaaatggggatttttttttccccataaccacctgaatgtgatttgtgggcttatgtgttctgatttgaacttcatatagcaaggttgtggcttttggcagatgcagtatgttctgagcgcggctcctagagtctacaatttggagtccaggaaggggtggctgtggagacaagtgagttttgtacctccgtaagccaccctttttcagggtcagttcatgtgttagtatcaggggcatctcagatgattaaactcatgggaaaaacttcctccttccctctctccctcttgccctcctgcctcttttttttttttttttttttaatttgggcacttataaaatgttttccctctacctgctgctactctgccaagagccaccaagtgcttatatttttcattttttactcctttagtttggaaagccatatacgtttgagaaggtgttttaaaactctgtgttacacttacgatgcaaagccaaatcagaacttctgtaaggcagaactttcccaactttaaaaaaattattgtcccctctaggagccttcttagacgttttttcctaatcaccccccaaagacattttaataccacatatatattgtttatgtactatatgtatatacataaacaatacataagcaatacatctgtggtattaaaattaaaaagaatccaattatgtttacctcaaaagaacctgtttttgcttcttgggagcaatattgcccctgtgagactgcatgctataaggtaaggttgtgcttgttaaagacccaagacatgactgggttccacagtctccaaaggaagagggtgggctagtttgtttttattattattttaaaattgtataattggggtctttcttagagttcagaaaaggtatagcttactcttttttaattgtttatttagttgtaagcttagtgattgttttctgatccacattgtgtgtgttcttcaataaaatctttcatttctgcaattttaaaaaaaaaaaaaaaaaaaa

SEQ ID NO: 7335 - DNA, 2373 bp, Homo sapiens
tgggagccgctgctggtcccggccttgcggcctgcgggggaggctgcccggaggaggcagcggcggcggcagcgcgtcctcggtccccaggaccacggcttctttcctgccagagcgactctaccttggaaaccagggattccccttcccgtcgcccgccccatttgatatatgggcctgaaatgtatgccatcccatcaccatcggactggactgttcacagcactggagagacagaggtccttcattcactccaggtcacaggctgtgcgtgtgcatgccgaacacccacatgcacacagttggtggctcagtctgatgtacctgacttctcacgccttcccccagtcctccagtaccgtgcctctacatgggctgggcagccccaaactgaaatgtgagtgccagagtgcatcctttaagcgaggtctgccccacggacacccgctccctctgtgtccctgttttgacagatctatccatctggccatccatccgtgggggtctgcaatggccacctttagccgccaggaatttttccagcagctactgcaaggctgtctcctgcctactgcccagcagggccttgaccagatctggctgctccttgccatctgcctcgcctgccgcctcctctggaggctcgggttgccatcctacctgaagcatgcaagcaccgtggcaggcgggttcttcagcctctaccacttcttccagctgcacatggtttgggtcgtgctgctcagcctcctgtgctacctcgtgctgttcctctgccgacattcctcccatcgaggcgtcttcctatccgtcaccatcctcatctacctactcatgggtgagatgcacatggtagacaccgtgacatggcacaagatgcgaggggcacagatgattgtggccatgaaggcagtgtctctgggcttcgacctggaccggggcgaggtgggtacggtgccctcgccagtggagttcatgggctacctctacttcgtgggcaccatcgtcttcgggccctggatatccttccacagctacctacaaactgtccaaggccgcccactgagctgccggtggctgcagaaggtggcccggagcctggcactggccctgctgtgccttgtgctgtccacttgcgtgggcccctacctcttcccgtacttcatccccctcaacggtgaccgcctccttcgcaggggcaccatggtaaggtggctgcgagcctacgagagtgctgtctccttccacttcagcaactattttgtgggctttctttccgaggccacggccacgttggcgggggctggctttaccgaggagaaggatcacctggaatgggacctgacggtgtccaagccactgaatgtggagctgcctcggtcaatggtggaagttgtcacaagctggaacctgcccatgtcttattggctaaataactatgttttcaagaatgctctccgcctggggaccttctcggctgtgctggtcacctatgcagccagcgccctcctacatggcttcagtttccacctggctgcggtcctgctgtccctggcttttatcacttacgtggagcatgtcctccggaagcgcctggctcggatcctcagtgcctgtgtcttgtcaaagcggtgcccgccagactgttcgcaccagcatcgcttgggcctgggggtgcgagccttaaacttgctctttggagctctggccatcttccacctggcctacctgggctccctgtttgatgtcgatgtggatgacaccacagaggagcagggctacggcatggcatacactgtccacaagtggtcagagctcagctgggccagtcactgggtcacttttggatgctggatcttctaccgtctcataggctgaggcacatctgtggaccctcataaccctcttaagacccctctcagggtgccactgatgggggatgagggaaggccctctctctactccttgaccccctccatccttgacccccaacacctcaacacacacacacacacacacacacaaaatcacaccattttcatgcctgtcaatccccaccccaccacaaggcaggaagggggtggtgcctgctggggcctagagggggatgcttggggaaacagagaaggggagatccagggcctccccgccttccttcttcctttttatatacaatttgttattgtcaaataaaagtaggaaatattcaataggctaacaaaaaactccgaggactttatacgacgcggtggggaaaaacagggcatggaagtggcacccggggctccaacgctggtacgtgaacccaagttttggaccagggggaaattcgcgggcacccataaaggggggataattcgagagcgggtacga

SEQ ID NO: 7336 - DNA, 2921 bp, Homo sapiens
  misc_feature (1149)..(1155): n is a, c, g, or t
  misc_feature (1593)..(1638): n is a, c, g, or t
  misc_feature (2797)..(2797): n is a, c, g, or t
  misc_feature (2812)..(2812): n is a, c, g, or t
  misc_feature (2821)..(2821): n is a, c, g, or t
  misc_feature (2849)..(2849): n is a, c, g, or t
  misc_feature (2861)..(2861): n is a, c, g, or t
  misc_feature (2876)..(2876): n is a, c, g, or t
gcgtcaccctgagacgggcggcggcgggatggcaacagcctccggggcctcggacttgtctggctccggagcgcccccgcccggtgtgggagctcaggcggcggcggccgctgaggaggaggagcgagaggtggtgcgggtccgagtcaagcatggtgatggggcccctggtggcctaccccatgtcttgaattccggtaagaagctctcacatttcttgccgccagagttccgctcttttgctgtagatccccagatcacctcgctcgacgtgttgcagcacatcctcatccgagcctttgatttgagtgggaagaagaactttggcatcagctacctgggccgggaccggctaggacaggaagtttacctctcacttctatctgactgggacctcagcacagcctttgccactgcctccaaaccttacctgcaattgcgtgtagatattcggccctcggaggacagcccattgctagaagactgggacataatcagccccaaagatgtcattggctccgacgtgttgctggctgagaaacggtcatcactgacgactgccgccctgccctttacacagtccatcctcactcaggtgggccgtaccttgtctaaggtccaacaagtgctgagctggtcgtatggggaagatgtcaagcccttcaagccacccctgagcgatgctgagtttcacacgtacctgaaccacgagggccagctctcccgacccgaggagttgcgcctgcggatctatcatggcggtgtggagccctcgctgcgaaaggtggtgtggcggtacctgctgaacgtgtatccagatggactgacaggccgagagcggatggactacatgaaacgcaagagccgcgagtatgagcagctcaagagcgagtgggcccagcgagcgagccctgaggacctggaattcatccgcagcacggtcctcaaggatgtactgcgcactgaccgggcccacccctactatgcggggcctgaggatggcccacatctacgggcgctgcacgacctgctcaccacctatgccgttacccacccacaggtgtcctactgccagggcatgagtgaccttgcctcacccatcctcgctgtcatggaccatgagggccatgcctttgtttgcttttgtgnnnnnnnatgaaacgcctggccgccaacttccaccctgacggccgcgccatggccaccaagtttgcacacttgaagctgttgctgcgacacgctgaccctgacttttatcaatacctgcaagaggcaggcgctgatgacctcttcttctgttaccgctggctgctgctggaactcaagcgtgagttcgccttcgacgatgccctccgcatgcttgaggtcacttggagttcgctgccccctgatcctcctgaacatgaggtagagctggttggaccccccagccaagtggcagacactggttttggtggccacagggggtggcccgtgcgacagaggcacatgctgaggcctgctggtggaggaggtagtacctttgaagatgctgttgaccacctggccacagccagtcaggggcctggtggtggggggcgtctcctgagacannnnnnnnnnnnnnnnnnnnnnnnnnnnnnnnnnnnnnnnnnnnnntccaggagggaccctctggtccagctgccccacccagctgcccttatcagctccaagtccctctctgagcctttattgaactccccagacccactgctctcctccttttcccaccctgattccccatcttcctcatctccaccatccacccaggaggcctctcccactggtgatatggctgtaggatcccccttgatgcaagaggtaggctccccgaaagaccctggaaagtccctgccacctgtaccaccaatgggcctgcccccaccccaggagtttggccgggggaacccattcatgctgttcctctgcctggccatcctgctggagcaccgcgaccacatcatgcgcaatgggctggattataatgagctggccatgcactttgaccgccttgtgcgaaaacaccacctggggcgcgtcctgcgccgggctagggctctctttgctgattacctgcagtcagaggtgtgggactcagaggagggggctgaggccacagccgcatcttgatcaggctttctcaagccctccatcggccccaccagatctccattctttgccatgagggccaacacatgagaccccacctccctccctgcctgccagccctagacttgttggagcatagagcccttcctccccaggcctaagtatgtggagctctgctttggcactgccccgcagaggccacgcctatttattctgtttctgttgttttgtttttaacaactatactttgcacacatgaaaaaaaaaaaaaaaaaaaaaaaaaaaaaaaaaaaaaaagggtttcgctgtagatggagtcctcaggggccctttacctgatggaggggaaatacttcacttggtggagagaggctccagcttcccccttgtgatggggagagtggatgctgacaatcagttcccaaaggtgagcccaggtggagcactgcttgaggaaggcctgagtctgtttttttggtacatccatcggcctgtaagggtctgtattatggctgtgaatatatgttttcaggacagccccctggatgagagataagagagttcctgggctcaaaaaaggacaagattctttactgagattgggaagtatgggctacttagaaacgttggagcagccacccctggcattccacatgttcaccatttnttaggatcttgggcntctctgtgnaggtttttgcaccaatgctgggcagccnggggcaggggcntcggcttcctttttnttttccatttcagacaggtaaccctgcagatgttaaacaaggttt

SEQ ID NO: 7337 - DNA, 875 bp, Homo sapiens
gggccgcgggctcccgaggcccctgaagggctgcgcgtggggacccgccatgcttctgggttccgaacgggggtgagctccgtctcctcacccggccccgcacccgctgggcctggggacccctcactccccgtgcccgcccctccgcgaggcagcagaaagcgcccggccggggcctctctctactccatcttgccacagttgtctgagaagccagaaaaagtttccagaactggcagcccttaaaaaaaatgaagaggaagagaagaaatgggagcaggcagccctcgtcagcagaccgggagccgcgtgggcgcggagccatttgcattccggtctgcgggggctcggggatgctggtgacaggcccggttcccggtggctcgcccccacctgcgggcgtcgggaaggatcccttccatctctcagccgcagaggaggccctggcagcgccccggctgtagccatgcaaccccgaggagtcccgggcaccttcaccccaccgggaggggccacaaggacctgggcctcggccaccaagctttgtcccctctcgctgtggggggctagtgattctcctccgacctgacgattgcttggttttttcaaaagggagttttgtgcggtgagaagtgtgtttctgtgtggctaactctgggctagcgtgccgtggccattgaaggtgtggcctgcgtgggtgcagtgtaagtgacgctggattgtcaggtggcagcagggggcccctgctgtgtcagtgctaatgaaacatgttggttggtttctaaaataaagccaaacaagccagcacatgccgaggcttggaccctgatagaaaaaaaaaaaaaaaaaatatacaggggggaaaaagagtgaaa

SEQ ID NO: 7338 - DNA, 723 bp, Homo sapiens
ttgctctgttgcccaggctgaaatgatcatagctcactgcagcctcgacctgagtagctgggaccataggcacaccccaccatgcccagctaattcgtttttattttttgtagagacggggtctttctatgttgcccaggctgatcttgaactcctgggctcaagcgatcctctcacattggctttccaaagtgctgagattacaccatgcctggccttcatctttgtaaatctccatggcctactgtgtgaagtatttgttcatttaggaaatacctacagagcatttcaatgccttgctcactttagctcatcagagcaaaccagtgaagtagattctattattatctccattttacaggtgaggaaaataggtgacttgcccaaggccacacagctagtaactaggagaactgaaatttgaccccaggcagtcaggcaccagggtctgcagtcccaagtttaaactatgccaagaggctataattgcacctgctttgcctgatggaattctggaggactaagtggaccagggcatgtaaaaagctcttatcacagtgcctgaaacatggtcaaactcagtgaatgctacctattatcatttgtctgttatttgtgaggattgcccagaagtggatcctgagaggaagggtcctgtgcaagtgacttagtaaagacagctcccaaagaacggtctgatacgggataggcaattcgatggga

SEQ ID NO: 7339 - DNA, 3710 bp, Homo sapiens
  misc_feature (1079)..(1115): n is a, c, g, or t
  misc_feature (2533)..(2562): n is a, c, g, or t
tccctttcggccgtgggggagggggctcgtgtcccccccaacccagcccggaggccgcgtccgcccgcgcccgctctggcccccgcggagccgcgcaacttcccgggagcccgggccaaagtgagcgcaaagtgctgcccaagttgccgggatggagctgcagagccggcccgaggcgctcgccgtggaactcgcgcgccaccagaacggcgacctcaagaagcagctccacgaaaggcagccgcggatcgccgcgctcagcgacaaacaagctttgggaacgatcactgcagtgcctgtcacgggtcctcaggtcagctccttgcagaggttggccgggcaaggagcggcagtgctacctcaggttaggccaaagactctgattccagacagcctccccgttgccccgggccgggaccggccacccaagcagcccccaacattccagaaggccaccgtggtcagcgtcaagaaccccagcccagccctccccaccgccaacaacactgtcagccatgtgccagcgcccggcagccagccccaggccctcgccgagcccgccgccctcgcctctccgctgagcagtgcgggggtggcctacgccatcatctccacctcccccagcaatgccgccgccatggcccccagcaccgccgtgtctgtggtcagtgacagcatcaaagtccagcccctcctcatcagtgctgacaacaagcctcctccacgcctcctctcttcccctcaccccgcaacccatcactgtcccctccacccctcctctcttcccctcacccctccctccccatcactgtccccttcacccctccatggcatcttccaggtcatcatcattcagcctcaagtgcagacgcagcccgagagcacggcagagtcgcggccgcccacagaggagccatctcagggagctcaggccaccaaaaagaagaaggaagaccggcccccgacccaggagaaccccgagaaaatcgccttcatggtagcgctaggcctggttaccacggaacatttggaagaaatccagagcaagcgacaggagcggaagagaagaagcacagccnnnnnnnnnnnnnnnnnnnnnnnnnnnnnnnnnnnnnaacggctggcctccaactatctcaacaaccccctgttcctcacagcgagagccaatgaggacccctgctggaagaacgagatcacccacgatgagcactgtgccgcctgcaagcgaggggccaacctgcagccctgcggcacctgcccgggggcctaccacctcagctgcctggagccgcccctcaagacggcgcccaagggcgtgtgggtgtgccccaggtgccagcagaaggccttaaagaaagacgagggtgtgccctggactgggatgctggccatcgtgcactcttatgtcacccacaagacagtcaaagaagaggagaagcagaagctgctgcaacgaggcagtgagctgcagaacgagcaccagcagctggaggagcgggaccggcggctggcgtcagcagtgcagaaatgcctggagttgaagacaagcctgctggcccgccagaggggcacccagtcatccctggaccgcctgcgggccctcctgagactgatacagggcgagcagctgctccaggtcaccatgacgaccactagccctgccccactgctggccgggccctggaccaagccctcagtggcagccacacaccccaccgtccagcacccccagggccacaactgaccccgagggaccagtcttcatacccacggaaagttattgggaccctgcttacacagcctgggggttctgtcggccttaattcataaacactatgaatttcagacaaaaattaaccagacagaggagaggagggaggaagagctgggcgagaggcctagagccaggaccaggtgggggtgcggccctgtgccctccaaattcacagggggtacctaggagccaggtggggtacgacaggctggggcacacagtctccccccggccacctcggggctgcctgggcctctggcttccaggccctgctctccacggcctccctctggcccgttggaggggcaggctgaggctgtggaggggacaagcacgccccccagaacgcagtctccactgagggcaccgcctattggtgtcctgtgggagggcgagctgagaacacatggactagctgagtggtagcggtagttgggacgagaagcggggtagtggatctaggtagttcctcaatgccccacgctcctaggaggtccccctggggtgggcgggcgggcctggggcactccgtcgcctttgcagaaccacctgggcccctttctgtcagtattattagggttacgaattgcagctgtttaacttgaaagacactgtcggaggtgagcatctgggcgccgggacgctgcagtgatccccgccagagcctgtgcccttcctgctccgtctttggggtcctcaaggctgcctccttccttttgccaatctcttggactcagtttgccgttgatgcgtttnnnnnnnnnnnnnnnnnnnnnnnnnnnnnntgcaaccctgttgtggggggcagcatttggcaggttttctccttggggttgaatcattcaacttaacgactgaagccctttcttgtctcctttggaagagccgataagtattccactcctccctttttgccagtgcagacactatgccaaaaaataacttcacacttttgtatggcgtttttattgtgagatatttaatgtgaatggttggggggactctggctgacttcctttctgcttctagtagtctctgcttcaaggtacaaatgggaacacctcccctcgggaagcctggccaagctggaagatccggcaggttttttacgagccgggtggagggttggggaggaaagaaagggcggtggcctcgggaggttccggccttcggggaccagacttgctgccaagggcttctgcatccagggtgggcagtggcagcttgtcacccttgcccgattcccacatcccagtcctgagggactcagcacaacaggataagcgtccaggagccacgggctcccaccccgagcatatcacatggtgccgaattgcactgaacacgcgtgtgtgcatcgcacgcggccacgaccacagacacgcatgcacacacgcagaggtgcagagcgaggaggccggcaaatcccgcagctgccacggtccctcctgtcattctcacgactccgggagaaactgtgctgtatgatacagatctattttaatacacttaccactgggtgaacaagatttttatattcttttattgatgaacaaagtgaaccgtgtgaggcacacgtcttctatattggctactctgtgccaagtatgcattaccgcgtggcttgcgatgtccatgtcttcagcttccttttctgttggtttggttttcttcgcggatggattgagttacatgttttaacagtgtaatgggaggatctgaaaggttggacccgggaggggtagctgccgatgtgtcttgagattgttaggttttttttggaccaaggaggaccgtccagtgggtagtgaggatagagaaaaagtgtttgtcttaaatacgccaatgtagttttccttctttacaatgtattaaactcgatcgatgatttcaaaaacaaaaaaaaaaaaaaaaaaagggggaggctaaaaga

SEQ ID NO: 7340 - DNA, 3683 bp, Homo sapiens
gcgtccgaaattaaccagacattgtggcatgtgcctgtaatcccagctactcaggaggctgacacaggagaattgcttgaaccaggaggcggaggctgcagtgagctgagattgtgccactgcactccagcctgggcaacagaacgagactctgtctcaaaaaaaaaaaaaaaaaaaaagaaaagaaaaaaaaaaagagcaacttactgctttgtgaggttgtgagtggccaccactgaaggtctttgagaagaggccagacgctgctgtagccaggcctgtcttaagaggacttgtgcttccagggacccaggcaggatgatggcgcagctcttcctactccaagccaacgctgtccttcccctttcccatgaaatcaaggtcaagaggcaaataagactccctgctccactctaccccccagagagaaatgattctcgctcctttcagatcccccaggatctgagggagaaaggatgggaggaggggcagcagcatttcgctggaaaggcagcagatgcttttccagccccggttcagctggaaggcttggaggccggccagaccactctggcgtctcctgaagtgggtccctggagaccgaagaggctcagtggagtctgtctgttgtcagcactgctgcctgatccctgcaagacaaatggcactttccttcttcagaagcatcatctgccttcattattagcagtaatattattcccagttattattcttaccggtgccagttttgcacatctttttgttgctctatttgtgtctcatttacttctcaaattgcccctgggggcaggaatgaggatgcagagagatgcacgttaattactgtcgcatttttctgtggagaaaactgaggccagggctgaacgctcacagctaaggagctgtgattcagacccagttctgtcagctctagaggcaccctgcatcatgcccaccagggtgatccccctgggatggaccatctcgggatatgaggcctcggaggctggggttgagatttggtcctgaagagcttatagccagattgccacattcaagtgtaagtccaggaaaggggcaggcggcagtgcacagggatttatcagttccagaacctcacagtgataagaggctttagagagcatctaatcgagacctttaatttttcggggagagcagctgaggccgtgtggaaaattagtggagagctgacaagtgtctgggctcctggcccaggggtccgtggtccagcacgttgtgcgttcagtgggaagcaaagggcttgcccgggattacctgccccagccccgaggtgggttgtgctccctgcagctgccatcggcccgctttgcttcgtcctggcagatgcccagtgattgtccccgagcaagtgccagggttgggctgagctgctatgacagggaggcccagggagttctgctcagggagccaaagggaacagccagatcctgaatgttctatgttcacctgccccagccccacccaccctggcccactccacaggcccctgaccatggtcactcacggagagggatggaggagaaggtggttgaactgagtactgagaacccagaggacagagcccacagcttccaagcaggaaaagggacctctctgaaaaatctggataaccagaattatcacagcaccttctcattcccagcgcgtccttctgagctcagaccttgagcatttactgggtttctttttgaggaagagggaaagtgacaaaggacaaaacaatgcaaatcttcatgactgaagacgatcaaagactccctggagcgagaaaacagttactggccgaaagcaaaatggaaagagcccaaaaagtacacaaaatggacgccataaattctgaaataaaagtgtatgatgtgttctgagtcactgtagaagtcatgcatttattatcaagatagaaaagagcagagaatgacgtggacattggtcctcggagaggctgcataggtggtgcggtccccgggggattctggatgctggtcttttgaccgtggcggcagcctcgcgcctgcccggatggctccatccagacatttggcaaggctgtcatctgctcttgggtcctttttcaagctgatttcctgcctccccaagaggaggtttgagccccattctgccttggaaataaatcctgacagatgtgcacagcatatttgcagggaatttgcaggcctcgattattgggggaatcagagcccattccacaccgagccccatccacgtggctgagcaacacccctgtgtcccctgtatctgtctcactggctgtctttctgccagtttcttaaagaaccacaccattactgcgtttgccgttcgaagcgttgtcccaacaatgcagatggttctgacaagggctctatatgctggcagaagggagcttccaaccttttaacttgaggaaaatgaatctctgagaggcttgagagtgttgccaggtggagcttttcaggagacaggggtcttgagcccaggacacctaactatcgagttttcactaggagacttagtggtggctttcatgaggccagtcgttctcaaggaagggctgggggccatcagcaatgtctggagacatttttgattctcacagcttggtggggactgctattggtatctcatgggtggaggccagggatgccaccgaacatcctacaatgcacagggcagccccccacaaataagaattatccagccccaaaatgccaatagtgccgaggtcaggggaccctgtgctggccatcctatctctgattctgaaactatgcatgctttccacttttccccatttgtgagtcattgagtaaattaaagctcttctgagcagcagcagtgatcatggtcactgccctgcgttcaaataatgcgagctgaggacagtgatctgcaactcccagcatgtcatgtggtctcttagaaatccatgtgactgtttccaccatcttgggcatttgtggggacccccagactggagggagaaagccctacaaagtggatgggagtgtggggctgaactttccccctacccttaactttgtgtctctgggacctccagggacctggcccctcaccaatgcatatgaagagtatgcttggggaagagcttaggaatggggtgggcatgggagtgctgggtagcagcctttgagcaaatctgcatcttctcttatttctgacctttttccatgtgcccagtcctatttctgccagttgaaggcatactaatattctttatactatttaatcttttgcagaaaccttactattataacttgctactctccagataccaattcttcatgccgagagcatcggaaatgtttttgtgtcttactgatgttttcatgatcaacttgtaaatgtaagcagttgacttcataaaaggtattttaactattcttggagtcctttgctacccaagcacctggtttcaccatgcgatcactgacttctctacagtgaagactctttcttaatataggatttcgctgtgctcttttgattaaaaatatctaaccttaaaagacgtaaaaatgtatctgtgaaatctcactttgttagcgttgctgctgttgtcattttctattatgataactgaaaagagaaaagaagaaaacatgaaaaaaaaaaaaaaaaaa

SEQ ID NO: 7341 - DNA, 2495 bp, Homo sapiens
agtccgccgctgctgtctgcggggtctggcgccggggtctgagtctctgctggctaagccgccgcctcagccgcctcagtcgcctcaatctcgccttccgccctcgctctccctccgcgccaccagaccccgtagccccgcgcgcccccagccctttaagccagatgatgaacttcctgcggcgccggctgtcggacagcagcttcttcagctcgctgtcccaagccgtgaagcagacggccgcctcggctggcctggtggacgcgcccgctcccgcgcccgcagccgccaggaaggccaaggtgctgctggtggtcgacgagccgcacgccgactgggccaagtgctttcggggcaaaaaagtccttggagattatgatatcaaggtggaacaggcagaattttcagagctcaacctggtggcccatgctgatggcacctatgctatggatatgcaggttctccggaatggcacaaaggttgtccggtccttccggccagacttcgtgctcatccggcagcatgcatttggcatggcggagaatgaggacttccgccacctgatcattggtatgcagtatgcaggcctccccagcatcaactcactggaatccatatacgacttctgtgacaagccatgggtgtttgcccagctggtcgctatctataagacactgggaggagaaaagttccctctcattgaacagacatactaccccaaccacaaagagatgctgacactgcccacgttccctgtggtggtgaagattggccacgctcactcaggcatgggcaaggtcaaagtggaaaaccactacgacttccaggacattgccagcgtggtggctctcacccagacctatgccactgcagagcctttcattgactccaagtatgacatccgggtccagaagattggcaacaactacaaggcttacatgaggacatcgatctcagggaactggaagacgaacactggctctgcgatgctggagcagattgccatgtcagacaggtacaaactgtgggtggacacctgctctgagatgtttggcggcctggacatctgtgctgtcaaagctgtacatggcaaagatgggaaagactacatttttgaggtcatggactgtagcatgccactgattggggaacatcaggtggaggacaggcaactcatcaccgaactagtcatcagcaagatgaaccagctgctgtccaggactcctgccctgtctcctcagagacccctaacaacccagcagccacagagcggaacacttaaggatccggactcaagcaagaccccacctcagcggccaccccctcaagggggccctgggcaaccccaaggaatgcagcccccaggcaaggtgctgcctccacgccggctcccccctggaccatcactgccaccttcctcctcttcctcctcttcttcctcctcctcggctcctcagcggccgggcggccccaccacccacggagatgcaccctccagcagcagctccctggcagaggccctgccacccctggctgctccaccacagaagccccagcctcacccacagctcaacaagtcgcagtccctgacaaatgccttcagcttctctgagtcctccttcttccggtcttcagccaatgaggatgaagccaaagcggagaccatccggagcttgaggaagtcctttgccagcctcttttcagattagctcttcagacacacggggcacccagcccaaccgggaaaggcatctaagacattcaccaacaacagtcagccagcttggtggtgatgtcccatgaccttgacgtgtgtggtcccttcctctgctctgttgtactaagtgatgttgtgcagcccagaaaggaccatttgacagtctcagggcaggtgcctacccagcaaggggtacctggcatcagagaggaaagagctgcttccctgtagtcatgagagcttccttctgaagtcatcgttcgctgtgagtttagtggccttattgtgacagtgccatcatgtcttattcttccctgtgaaaccaggattaatcgtggactcctggcagcttaacctagctcagttgcagtgctaagcatgccccgcccccattcagtgatacctgtttgggaagtatatacttccccaaaagtactcttggccctaagttttaggaactttccccgacctggatcccttgtcatacctgtgttactgtttaaagcacacccacccaacttacaagatcttaggctgctgtggtggtgaagcaccttgagtctgctgatattcgggagaacaaggatctgcagtttccccttttctcccctctgaagagtggttcttatgtgcaatctgcagtaaccttgaactccagagctgcactatagaggagaatgcatgccactatgacagcagtatgccaagctttgtgttcatctcctaataaacgttaagacctttggtgtaataaaagcagcagcattcaccaacgagg

SEQ ID NO: 7342 - DNA, 3266 bp, Homo sapiens
  misc_feature (222)..(237): n is a, c, g, or t
actctgacctcagatccccgattgtatatgaaaatttctggcaatgccatgctacagttgggccccttcttatattggacatttctggctgcctttgaagggacagtgttcttctttgggacttactttctttttcagactgcatccctagaagaaaatggaaaggtatacggaaactggacttttggaaccattgtttttacagtcttagtattcactgtnnnnnnnnnnnnnnnnttggatacccgattctggacgtggataaatcactttgtgatttggggttctttagccttctatgtatttttctcattcttctggggaggaattatttggccttttctcaagcaacagagaatgtattttgtatttgcccaaatgctgtcttctgtatccacatggttggctataattcttctaatatttatcagcctgttccctgagattcttctgatagtattaaagaatgtaagaagaagaagtgccagggttcatcacttaatttcctcttctgcataaaaagtatagtaaaaacttcgttatccaatgcaggtgaatccgaatcttgaactgcctatgttattgtcctacaagcatactgacagtggttacagctaaaaaagaaagcatgaagaaacaactacaaaaagttatcatctcaggatacttgatatgcaacacactaaaccactctcatgtctagagttcacaataaatgttcattaaaataccaaatgattctcttaagcatttaccattattgtaagtagcctttatggccaaagctgtaagttaagaattatatgaaagttgaaagcaagaatacttagaattctggctttagttagagtaatataactcaaatgggtgctcttttaacccatgaactttgtgaatggatttaaatacaatagtatgaagtagaagttatgcaatgagaatgaatagattttgctaatactactttttttgcctggcagaagaaatagactatttggatcacatttctcattcctcctaaatgatcatcttaattttttttcccaagtacataaggaatacttgaaaatacagaataactaaatagtatcaatgcatcagacagaatagttaatcccttctgtttacccatgtgctactaatgtcttggtagaatattcttgccaaaaaaataccttgaacgcttatgtggaaagtgttaacttacgggtatttttgtgggaatagaaaaaaattgtttattttttattcttctgaattaaaccccacttatgggtgtaagcctactagacttgaaaataaagtataaaacatttccaatcacttagtagcccctcaaagtagttagaaaataaacagatttttccagtgttgattttactgggatctgcagtaaggtggtttaaaccatagttatataaaaataaaggtcattctgaatatcagccttttataattttatgtgaagaggaagaaatatagcttattttaaacttttgacggtttttatttgaaagagattgcatttatgcatatatgcagtgctttttcttaaacttggccatttggaaagggggaaggagccaccccaaaacggtggttcagcttgtagagccatgactctgtgaagatgaatgttgtctcttaacttggacagggaaatggtctaactctaaaccatgtaactgaccttagtaaagtccttgactaactgaactagaaggaaggtttagccttctaattagttcacttgaaacataaatgtgaaatgtcttcattcaatgttaaacacatacttttttggatataaatgaccatatttatttgactgctagtttttttgttttttttttgtctttctggcatgcctgtactattattaatgtttatattgtaccttgatttggaaaagtattggagttaatctgtattatatttatatagtccatatggcacatttgattcttccacatatattttgtgttaatgtttaggtatgatttttttctaaattctagaaaagaacataatttcagttatcagaagccattccatcattatagaccctttttcattatttcatttgctctcatatatcagtattatttttgagcattttgttacatgtcattcacaacttacctaagtgtgctgtgttctggtagcccgtatttgaggtaagctgctgaaaacaaaagtctctatattctttgcctattccaaagagctaaaaaagtctaacccaggaaagcttttgatattttgtgtttgttttcttgttcttatggttgttgttgctgtattatgattgctgttttacataaaatctatgggaactgtgaatacagacaagagagccacagtagagaggcttgtttaatgcagtaccattggagagttaacagaataatctagtagaaaaataactggttgcatgtaaaattccttccagccagaaagaaagaaagacaaggagtaagggggatttagagttatgtctcagctacacattacattgtgatactgcagctcaaattcagaatggcaatgatacatgatatcatggcctagatccttgagagggacctggctttcctttttaaaagatattttactgaagagctaaaaactggccagtgtggggttagcagatcgaataacttgaaatagaccgtgcagtattcctagcactcaatgtaatcaccctatttgtgacagagaaagggaaaaaaatataataagatcatctacctataatttgaataattttgagctatcaaaatgtctttgtaattttcacaaccgctgtccattgtttgaggatgttacctactaaactgaaaacattcattccatatctacttacacatacaccagcaacagtataaatgtaagcctaactttgcaaaattcgtaataatttagtgatggaattttttaataacatgcagtatataaatgtgcagattttatgcgtgttgacaaaatcatttttcagcttgcaaaatgggactgcaatattacatttttcacttaagcagttttttacatctacgttgttgctttctaaaatgaatgtgaatgccatcttttatgactgcaacttgccttttccattacagaaatttttgtttgatgtaatcaataaactttggtatgatatgaaaaaaaaaaaaaaaaaaaaaaaaaaaaaaaaaaaaaaaaaaaaaaaaaaaaaaaaaaaagaagaggggggaagattgaaagaaaggaaataaagaaggggc

SEQ ID NO: 7343 - DNA, 1465 bp, Homo sapiens
atccccccggagaggcccccctttccaacccccccgataatacaccccccccccccgcccctgggttgcgcctttccctgtaatggggtgatacttccatagggtaaccaattttcctcccctggttctcctgcctgattggtttttttttcaatggttttcgggtttgttttttgaccatccagcctgtaatccattccctggtgctggtgtttttttatttacccctttggtagggtattagaccttgccccttttttaaaaaaaggtttctgccatcgtggaagcatttgaccccagagtggaacgcgtggcctatgcaggtggattccttcaggtctttcctttggttctttgagcatctttgctttcattcgtctcccgtctttggttctccagttcaaattattgcaaagtaaaggatctttgagtaggttcggtctgaaaggtgtggcctttatatttgatccacacacgttggtcttttaaccgtgctgagcagaaaacaaaacaggttaagaagagccgggtggcagctgacagaggaagccgctcaaataccttcacaataaatagtggcaatatatatatagtttaagaaggctctccatttggcatcgtttaatttatatgttatgttctaagcacagctctcttctcctattttcatcctgcaagcaactcaaaatatttaaaataaagtttacattgtagttattttcaaatctttgcttgataagtattaagaaatattggacttgctgccgtaatttaaagctctgttgattttgtttccgtttggatttttgggggaggggagcactgtgtttatgctggaatatgaagtctgagaccttccggtgctgggaacacacaagagttgttgaaagttgacaagcagactgcgcatgtctctgatgctttgtatcattcttgagcaatcgctcggtccgtggacaataaacagtattatcaaagagaaaaaaaaaaaaaaaaaaaaaaaaaaaaaaaaaaaaaaaaagaaaaaaaaaaaaaaaacaaaaaaaaaaagcaaagcacagcaaagaaaagaaaacagaaaacaaaaacaagagggggacccaatactaaaaaaacacagcacagggagcgacaaaaaaaaaagcggaagcaacgtaagagaaaaagagacgaccctacaagaaggtaaaaacgacaaacagaaaagaaagtgaataacacaagagaacgagaggaggagaaaacatgagagcggaggagcaagcggaagagacagcccacacaccccacaccaggggaacaccaacaaaagaagaaacacacacaaacaagagaaagaaccagacgcagacagcacaaacaaacaacaggacagaaaatagaggacaacaaacagacaacagaagacgcgaaaagcaaaaaaacagaaaagaaagagaatctatgtacaaaaaaaatatacaga

SEQ ID NO: 7344 - DNA, 2227 bp, Homo sapiens
cgcagcaaacacatccgtagaaggcagcggggccgccgagagccgcagcgccgctcgcccgccgccccccaccccgccgccccgcccggcgaattgcgccccgcgcccctcccctcgcgcccccgagacaaagaggagagaaagtttgcgcggccgagcggggcaggtgaggagggtgagccgcgcgggaggggcccgcctcggccccggctcagcccccgcccgcgcccccagcccgccgccgcgagcagcgcccggaccccccagcggcggcccccgcccgcccagccccccggcccgccatgggcgccgcggcccgcaccctgcggctggcgctcggcctcctgctgctggcgacgctgcttcgcccggccgacgcctgcagctgctccccggtgcacccgcaacaggcgttttgcaatgcagatgtagtgatcagggccaaagcggtcagtgagaaggaagtggactctggaaacgacatttatggcaaccctatcaagaggatccagtatgagatcaagcagataaagatgttcaaagggcctgagaaggatatagagtttatctacacggccccctcctcggcagtgtgtggggtctcgctggacgttggaggaaagaaggaatatctcattgcaggaaaggccgagggggacggcaagatgcacatcaccctctgtgacttcatcgtgccctgggacaccctgagcaccacccagaagaagagcctgaaccacaggtaccagatgggctgcgagtgcaagatcacgcgctgccccatgatcccgtgctacatctcctccccggacgagtgccttctggatggactgggtcacagagaagaacatcaacgggcaccaggccaagttcttcgcctgcatcaagagaagtgacggctcctgtgcgtggtaccgcggcgcggcgccccccaagcaggagtttctcgacatcgaggacccataagcaggcctccaacgcccctgtggccaactgcaaaaaaagcctccaagggtttcgactggtccagctctgacatcccttcctggaaacagcatgaataaaacactcatcccatgggtccaaattaatatgattctgctccccccttctccttttagacatggttgtgggtctggagggagacgtgggtccaaggtcctcatcccatcctccctctgccaggcactatgtgtctggggcttcgatccttgggtgcaggcagggctgggacacgcggcttccctcccagtccctgccttggcaccgtcacagatgccaagcaggcagcacttagggatctcccagctgggttagggcagggcctggaaatgtgcattttgcagaaacttttgagggtcgttgcaagactgtgtagcaggcctaccaggtcccttttcatcttgagagggacatggccccttgtttttctgcagcttccacgcctctgcactccctgcccctggcaagtgctcccatcgccccggtgcccaccatgagctcccagcacctgactccccccacatccaagggcagcctggaaccagtggctagttcttgaaggagccccatcaatcctattaatcctcagaattccagtgggagcctccctctgagccttgtagaaatgggagcgagaaaccccagctgagctgcgttccagcctcagctgagtctttttggtctgcacccacccccccaccccccccccccgcccacatgctccccagcttgcaggaggaatccgtggggtcctgtcctgaaggtgctgtcccggggccggtggctgccctcaaggtcccttccctaaatgctagcggttgcccattgcttcttggcctgttctgggatcagggaacctggaattgagtttcacaggattttgttttattcgggatttggtggccagggccccagattgggctccccaagctgcgaattcctgggggagagaaaaaagcttgggggctttggttgggcacctttctacaggcttaagtggttcctctcccttcccaaaattggacacccctgtccttctatgcacggggcgtttctccggactggtgaccgccctcccaccacccaaccagacgcaagttcacgctcttccgccagggggcgcgttcttccgcgcggaccgcatttatctttactccgcaccccacccgcactttgcttatcccaccgcgttcacccatgcaccctacatgcgcccccggttcat

SEQ ID NO: 7345 - DNA, 3330 bp, Homo sapiens
  misc_feature (154)..(169): n is a, c, g, or t
acggacccgcacggtagtagatgggggtgtggccgtggcccccgactctgctcggcggggccgttcctgctttgccatccgtgtgggacttccacgacagtggaggcacgagagctgggccccatatgctgcttgcccagcttgggaaagaggnnnnnnnnnnnnnnnnaccgatcggcggcttcgggctgccggctcactcggctgctgcgtctggtctggcgtctgctgagaagatcctcttctaccctgctctgcacctgtgctcgactgccagccggctgagggcgggggtctccacggtggtcccagctcccaaggaggttgcagaagtaccgtacagagtggatttgcagggcagtggcatggagcccctcttccccgcgccgttctgggaggttatctacggcagccaccttcagggcaacctgtccctcctgagccccaaccacagtctgctgcccccgcatctgctgctcaatgccagccacggcgccttcctgcccctcgggctcaaggtcaccatcgtggggctctacctggccgtgtgtgtcggagggctcctggggaactgccttgtcatgtacgtcatcctcaggcacaccaaaatgaagacagccaccaatatttacatctttaacctggccctggccgacactctggtcctgctgacgctgcccttccagggcacggacatcctcctgggcttctggccgtttgggaatgcgctgtgcaagacagtcattgccattgactactacaacatgttcaccagcaccttcaccctaactgccatgagtgtggatcgctatgtagccatctgccaccccatccgtgccctcgacgtccgcacgtccagcaaagcccaggctgtcaatgtggccatctgggccctggcctctgttgtcggtgttcccgttgccatcatgggctcggcacaggtcgaggatgaagagatcgagtgcctggtggagatccctacccctcaggattactggggcccggtgtttgccatctgcatcttcctcttctccttcatcgtccccgtgctcgtcatctctgtctgctacagcctcatgatccggcggctccgtggagtccgcctgctctcgggctcccgagagaaggaccggaacctgcggcgcatcactcggctggtgctggtggtagtggctgtgttcgtgggctgctggacgcctgtccaggtcttcgtgctggcccaagggctgggggttcagccgagcagcgagactgccgtggccattctgcgcttctgcacggccctgggctacgtcaacagctgcctcaaccccatcctctacgccttcctggatgagaacttcaaggcctgcttccgcaagttctgctgtgcatctgccctgcgccgggacgtgcaggtgtctgaccgcgtgcgcagcattgccaaggacgtggccctggcctgcaagacctctgagacggtaccgcggcccgcatgactaggcgtggacctgcccatggtgcctgtcagcccgcagagcccatctacgcccaacacagagctcacacaggtcactgctctctaggcggacacaccctgggccctgagcatccagagcctgggatgggcttttccctgtgggccagggatgctcggtcccagaggaggacctagtgacatcatgggacaggtcaaagcattagggccacctccatggccccagacagactaaagctgccctcctggtgcagggccgaggggacacaaggacctacctggaagcagctgacatgctggtggacggccgttactggagcccgtgcccctccctccccgtgcttcatgtgactcttggcctctctgctgctgcgttggcagaaccctgggtgggcaggcacccggaggaggagcagcagctgtgtcatcctgtgccccccatgtgctgtgtgctgtttgcatggcagggctccagctgccttcagccctgtgacgtctcctcagggcagctggacaggcttggcacggcccgggaagtgcagcaggcagcttttctttggggtgggacttgccctgagcttggagctgccacctggaggacttgcctgttccgactccacctgtgcagccggggccaccccaggagaaagtgtccaggtgggggctggcagtccctggctgcagaccccgagctggccctcggaccgcacctctgaaggttttctgtgtgctgcacggtgcaggcctcatccctgactgcagcttgactctgggcccaacccccatttcccttcaggagaccagcgagaggccctggccatccctccagcggtgcaatgaactatatgctgtggaccgtcaacccagccctgcttctcagtgtggggcaggtgtctcaggacgaaggcgccgcgtgaccacatgggcagctctgttcacaaagtggaggcctcgttttcctggtcttgactgctctgtttgggtgggagaagattctctgggggtccccacatcctcccaaggctcccctcacagcctctcctttgcttgaagccagaggtcagtggccgtgctgtgttgcggggaagctgtgtggaaggagaagctggtggccacagcagagtcctgctctggggacgcctgcttcatttacaagcctcaagatggctctgtgtagggcctgagcttgctgcccaacgggaggatggcttcacagcagagccagcatgaggggtggggcctggcagggcttgcttgagccaaactgcaaaggctgtggtggctgtgaggacactgcgggggttggggggggggcgtctgtacctcaggggatgccccgctgtggtcacccagagaatcacccttcctggtctacagatggaagctgcaggttggtgactttgcaaatgcacttcctacagatgaactattaaaagacctgcaacattgaaaaaactcattttttccaccaaaaccttggccaggtaacctaccttaggcacctgcaaagaacaggaagtgatggctgtctcgcaacagagcctgggctgctcctcctgctctggggagtctaggccgtggggactgttctggggaggctcatgctgtctccatgacgtctgtggcaggagtccctgaggacgggagctgcctagctacagttttcttgccaaggcgaggtgttttgtgaatctgtgctgatgtaatgtgcaccttcacgtatttatgcatgtggcaagcgttacttcctgtgcacgtagccagccctgggtctgtctctggggtaatgaaaaaggaccctaataaacacctgctcactggctgggtattcttcgtaaaaaaaaaaaaaaaaa

SEQ ID NO: 7346 - DNA, 895 bp, Homo sapiens
  misc_feature (894)..(894): n is a, c, g, or t
gttaaaattaaattaaaattgagtagtatatctttttactaacccaccttttatgtaataaaatgcagcacattttaaaaattttagattattgtgaacttaaatttttaattaaacttttttttaacatgttaagaccaattgtgcattcagtgaagtattatcatgccactaacttcaacctatcccaccttactcaagggtgttggtaaaagatagtaacaatgtactatttaataacagagtggactaacatctctaataatttctcttgccagtgactttaaactaaagaacttaattaaagaacattgttcccataggttaaatttttattcttatttaaacatatttttcttaacttttgtgggtacatagtgtgtgtatatatttatgccatatatggcatattttgatacaggcatatgaataggtattaatcacatcagggcaaatgaaatatccatcaactccagcatttatcatttgtattacaaaccgattctacacttttagttactttaaaatgtacaagtaaattgctattgactatagggtcattttcatgggtataataaaaattatatacaagtataaataaaatcctgagtcttaaaattctgagtcctgcttaaacattttaaaaattttgttatgtatttttctttgaacatgtctctctgcctgcaaacataacagaattttagtattggtttacatagagttaactatacccatatattactctaaaaataaatgttaagtgcaagaaagttatggactgtttttgtgtgagtgtgagtttgtacctattttcaaaagaaaagagcaatattggaacaaaacaaatattttaataaattaatgtactagacaactgaaaacttcaaaatnt

SEQ ID NO: 7347 - DNA, 478 bp, Homo sapiens
aacgtgttttttttttttttttccttcctgctccagaagagagccttaaagcagggatgagagggtcctgaatcggtgtatggagtcaatttccccgccccctcgagaaagtcaatcacacccagttagtgacctgggcacacaaaatctccacataggaaaaagacagggtttgaaataggaaataaacaaaaatcagaattctattctttcacttcttaaaagtatctttttcctcccgcaattgctttctcaaaataccaaacttggactttgaaatcaagttctttttctattgctctccgcagttcttactgaaagcaaggatttgttttggtcccacatgttgaaaacttcacgtcgctataattaagagtttatatgccacgccttccaccgcgtttccctgttaaaactcccttctctaaaaaagatccctgaaaacacaactaccagctcgcccctcaagcagccacag

SEQ ID NO: 7348 - DNA, 1330 bp, Homo sapiens
gtgagtacgtagtacctatatgtatctatggattatatcactgattttgatgaaggcatgaaatgcacaaaaataacatcagataaatggttattcattgcctcaactatttgttctttattttacgaacaatctaataacattcttttagttacttaaaaatgtacaattaaattgctttgactatagtcactcccgaccagagaaaaaccctgtagacattagtcactcctcattctgtctcaaaccctctccctgaccctcagccctaggtagcaactacctagtgcgatcaatcccatatgcatagattaccatattgtggacatttcctataagcggaattgcacaataggggagctgttatgactgacataacacgtagcacaatattttcaagattcgtccacattgtaggcttacccacagggggaaaccattttattgggggcttttagtaacaccggtgttttctccttccttacgtccttctttccttccttccttccttccttccttccttccttcctgacttccttctttccttccctccttcctcctatttctctcttactccttctgccctctctctttcctatgccttaggtgcatcccacattctgcgtttttttggggaaatcctcgacaggtgcaggaaaattgtgttattgtaacaatttaccgttatctctctttcacggctctccatcagttgtgaacatctattggtttatcccaagtcactaagcatattttcattaggtaaacctgtttttccttctacagctgtttctggagtatagggtcgcatactcataaacccagtgtaactcagaaacgcatctaatattccagtaaacccatcataacgttgaaaaatcgtaaatcaaaccatcataagtcacggtttgtccgtggatatgggcgtcatcaattccattgtattcagtaatgctgtacaccattaacaatggcagactgattgggagtggatattgatagcattataaaagtcagttattagagggatacttctttaacctgactgaagaactgatctaatggctttagtacagtgcatgattatgtgcgatgttttgagacagagtagtacatttgtgaatgaaattttatggcttttttttcacttagtaggaaccattgtgtgtggaaaagtgagaaaatggctttctgctgtagggtctggcattcattgtagatgtaagcttatttttctgtgagcaaatcttattcaataaaatactactctttatactaaaaaaaaaaaaaaaaaaaaaaaaaaaaaaaaaaaaaaaaaaaaaaaaaaaaa

SEQ ID NO: 7349 - DNA, 1434 bp, Homo sapiens
  misc_feature (1233)..(1259): n is a, c, g, or t
ggaaggtgggagacttttcttacgcccttggggcaaggtgttggggccacgggctcgcctttcgtgggggggcgggggtttttcgttattacggatgtttttttaggggatgtgggccaaccaatggttagtggggccggggggcccaattgcgttgggagcccaccaattaaatgatgggtgttcccgccagttttttttggagagaaggccctggaagcaaaccaactttgggctggttgggacttgggagatggtggtcattgcaagggtttttcattgcgttgcttggtgcgctttgacatcaggttgaagaagaatacccacacttacttctacaccagctttgcagcctacatctcggcctgggccttaccatcttcatcatgcacatcttcaagcatgctcagcctgccctcctatacctggtccccgcctgcatcggttttcctgtcctggtggcgctggccaagggagaagtgacagagatgttcagttatgaggagtcaaatcctaaggatccagcggcagtgacagaatccaaagagggaacagaggcatcagcatcgaaggggctggagaagaaagagaaatgatgcagctggtgcccgagcctctcagggccagaccagacagatgggggctgggcccacacaggcgtgcaccggtagagggcacaggaggccaagggcagctccaggacagggcagggggcagcaggatacctccagccaggcctctgtggcctctgtttccttctccctttcttggccctcctctgctcctccccacaccctgcaggcaaaagaaacccccagcttcccccctccccgggagccaggtgggaaaagtgggtgtgatttttagattttgtattgtggactgattttgcctcacattaaaaactcatcccatggccaaagagggccactgtaaaaaaaaaaaaaaaaaaaaaacaaaaagagaatagcgacagaaagggcggggcgcgagcttatgagaagattaatccccgcagagggggcacaacagattatgctgacacccgagttttgtttgctacaagaggttggcacccacatagaagagagcgcttataattcgaacaggcgagacagacgaggtcaccgcgtgtattatacaaacacgtcctatagcgagggaaaaacaaacggagtgacaagtgggagaccactattgaaaaaagcagcccaccacctcaaacattgtggnnnnnnnnnnnnnnnnnnnnnnnnnnngggaaacaaccttcaccacgaagagtaagtataaagacggcctagggcagaaacataattaagatctttgatggaataataatggtgttgaaccaaagacgcgccataaaaatcgtgagcacgcactaaagatatgtgccgccgagagtttattgtcctgacaaacttttaacgg

SEQ ID NO: 7350 - DNA, 1056 bp, Homo sapiens
  misc_feature (946)..(946): n is a, c, g, or t
  misc_feature (967)..(967): n is a, c, g, or t
  misc_feature (984)..(984): n is a, c, g, or t
  misc_feature (995)..(995): n is a, c, g, or t
  misc_feature (1016)..(1016): n is a, c, g, or t
ggggaaaaaaaagtcctaggagaaagcgacgtggctcattagtgttgcctcttcagtgctcaagccgcctggtggattcctatgacacagggggcctggaaagaaagggaaagtggatttaaaatatatatatacgtaacccaagccccataacccctaactggacaaatgaggtctgtttctttgggcctgaggctgtgccatataaagtcttattttgggactttacaaacttgtcctaactatcttgtggatagtgggctgtgacaatctggaatagagaacgttcacacttcgctcctttaaagaagcgaccccagatctgcaagggagtagattctgctatcttggcctcacagcccttcctgttgattacaaagcccgtggaagaaaacagaacacaccctcctcagttccgtctaaatgtgtttcttctgcttcaattacaccagttctggggcaaagacactgatgaaacaacacccatacctgaaaagaataaatgtgtgactttcaaatcccctttcgcagtgaaagaaacagcaaacacttaagattcagcatctgttctccagttgcactgaggaatgcactgtctcgcagcaccagctctgcagagcccttgccccagactctttgcggttttatttatatgtatttccatatttcattcctgtgtgtcactgctgcattggtgtggcagcaagtgaccaaatgctacaggtcttactatggacaccaggtcaggtgcaaccacacaaaacaaagccagttccatgagctgcctatgatatgcattgcggaagtaacattttacccagggtgtgccattgcagtgatataaatatatttttttcttagactaaaaaaaaaagctgactatccctttgatgtgggacataggtgtgagtgtgtcgtatgcgtgccgtctgtgtccggtgtgtgnagtgcgtcctccatgctaggnctaccctgaatgttgtngaagctaaccnggaaaatttgggtttccccanttcagtgagaattcatgtacagggcctgggccatcccctg

SEQ ID NO: 7351 - DNA, 3661 bp, Homo sapiens
cccacgcgatcgggcccctggccccggcccgggacccgaggtcccgcgcccgggtcagtgaaaggcgtcttcccgttcccgccctccgcctcctctcgccggccagcaacatgggatgtaatatgtgcgtggtccagaaaccggaggagcagtacaaagtgatgctgcaggtgaacgggaaggagctctccaagctgtctcaggagcaaactctgcaggccctgcgctcctccaaggagcccctggtgatccaggtgctgagacgcagcccccgcctccggggggacagctcctgtcacgacctgcagctggtggacagtggcactcagaccgacatcaccttcgagcatatcatggcgctgggcaagctgcgtccgcccaccccgcccatggtcatcctggagccccccccaatcagccatgagtattatgacccggcggagtttatggagggcggcccgcaggaggcagaccgcttggatgagctggagtatgaggaggtggagctgtataaaagcagccaccgggacaagctgggcctgatggtttgctaccgcacggacgacgaggaggacctgggcatttatgtcggagaggtaatcacggaggcatgggaggccaaagacggccggatccgtgagggagaccgcatcatccagattaacggtgtagacgtccagaaccgggaagaggcggtggccatcctgagccaggaagagaacaccaacatctccctgctggtggcccgacctgagagtcagctggcgaaaaggtggaaggacagcgaccgggatgacttcctggatgactttggctctgagaatgagggggagctgcgtgctcgtaaactgaaatcaccccctgcccagcagcccggaaacgaagaggagaagggggctcccgatgccggcccaggcctgagcaacagccaggagctggacagcggggtgggccggactgacgagagcacccggaacgaagagagctctgagcacgacctgctgggggacgaacccccgagctccaccaacaccccgggaagcctgcgcaagtttggcctgcaaggggacgccctgcagagccgggacttccatttcagcatggactctctgctggccgagggggcggggctgggagggggcgacgtcccgggcctcacggatgaggagtatgagcgctaccgtgagctcctggagatcaagtgccacctggagaacggcaaccagctgggcctcctctttccccgggcctccggaggcaacagcgccctggacgtcaaccgcaacgagagcctgggccacgagatggccatgctggaggaggagctaaggcacctggaattcaagtgccgcaacatactgcgggcgcagaagatgcagcagctgcgtgagcgctgcatgaaggcctggctgctggaggaggagagcctctacgacctggcggccagcgagcccaagaagcacgagctgtccgacatctccgagctgcccgagaagtcggacaaggacagcaccagcgcctacaacactggggagagctgccgcagcaccccgctgcttgtggagcccctgcccgagagccccctgcggcgggccatggccggcaactccaacttgaaccggacccctcccggccccgctgttgccacccccgccaaggcagctcctccaccggggagccccgccaagttccggtccctctcccgggatcctgaggccggccggaggcagcacgcggaggagcgcggccgccgcaaccccaagacggggttgaccctggagcgtgtgggccctgaaagcagcccttacctctcgcggcgccaccgcggccagggccaggagggcgagcactaccacagctgcgtgcagctggccccgacgcgaggcctggaggagctgggccacggccccctgagcttggccggtggccctcgggtgggcggggtggcggccgcggccactgaagcaccgcgcatggagtggaaagtgaaggtgcgcagcgacggaacccgctacgtggccaagcggcccgtgcgagatcggctgctgaaagcccgtgccctgaagatccgggaggagcgcagcggtatgacgaccgacgacgacgcggtgagcgagatgaagatgggccgctactggagcaaggaggagcggaagcagcacctgatccgggcccgtgagcagcggaagcggcgcgagttcatgatgcagagccggctggagtgcctgcgggagcagcagaatggcgacagcaagcccgagctcaacatcattgccctgagccaccgcaaaaccatgaagaagcggaacaagaagatcctggacaactggatcaccatccaggagatgctggcccacggcgcgcgctccgccgatggcaagcgggtctacaaccctcttctctcagtcaccaccgtgtgagctgcccgggcgggtacacggcccaggcccagggaaccccctggggccccggccctcactctcctatagagattgtgtgtgtgtgtgtgtgcgcgcgcgcgtgctcgctgtgcgcacgcacacatctcctcgtctgggtgtgcgcacagggctttgttagcagagagaagcccctgaggagaagggacgcttttcttccttctgcccaagtaaagtgaccatgccagtggccagcactgggggcacacctgtgatgggcaccccttcagctgtgcgtgtgcattccccatcccccatgctcttgcgtgtgcttgcacgtgcacgcacacacacacccagtgctctctccacccgacccgtgtacttgcagacagggaagctgagctgaaaggagcacaagagagtgtccggcttcgctgctgagcgcggcctctccccgccgctgcgcactgcagttatttgtagacaaaggcacccctgatttttgtggtttttctccctttctgtgcttgccaatagttgttttgttttgtggacctgccctgggggctggcagctccttcaggcagcctggcagaagtggaactcccctctccactgatggctgggaagggagttggggaggaagagtgggagggagggctggggatggatgggagggaaggggagggaaaggtgggaggaatgggaagcagctgttctggtggcttccactctgaggtgtgggaacggggagcctctggggggcacctgtttccccagtgactcagagagagcaagactgcaggaacggaggggtcctgcagggtgtccaccaagaagtcacagagcccgttctgcgccccacaccatctggagcaggggcttctcttctgagtgaactgaggaaggtgcttagatggtgagggctctagaaaccaagccccatgagcagcagtggaagacctcgggccatgcggcctggggaggacttggtggcgatccgcaacctggaccccagtgagaggcggtgggctgactgggaaggagaggcccccaacctcctcaggatttgcacgtgtgaactaggctgcctgtggggtgccccttaggcttggagagccccagattggaggcagacagactgcaccaccccttccccccctgcatctcaagaataaagcaagctgcctttgtacttggttgaaaaaaaaaaaaaaaaaaaaaaaaaaaaaaaaaaaaaaaaaaaaaaaaaaaaaaaa

SEQ ID NO: 7352 - DNA, 2936 bp, Homo sapiens
actttcggaggccgaggtgggtggatcatgaggtcaataaattgagaccatcctggccaacatggtgaaaccccatctctactaaaaacacaaaaattagctgggcgtggtggcgcacacctgtagtcccagctacttgggaggctgaggcaggagaatcactggaacctgggaggcggaggttgcagtgagccgagattgtgccactgcactccagcctggtgacagagcgagactccatcaaaaaaaaaaaaaaaaaagttcccacagctcaccactacagaagcagggaagacaactatgcagaaaacagagttagtggcggtcagcaggaatgcagctggtcttttggacccctacgggatgggggcagtgcagaagacactggtgaagtcctttatactgaagacctgtggttgggagcaggggtagtccatgggtctgctgattttttttccctatttagtactaatgtgtgtgtgatctttgttttacaaacagtaccttttgggttttctgcatattttataatttttgtacagttttgaattctatagattgtcttggaaggatactgtgtgatgggtcaggcacacagtaattggagacttttaatgtatgtaatatttcatagattgcatgctattaatcatctgtgagggtagtattttttgttttattgtaagtttccctctttttttataaattaaaagatggttggtattaggaatttcaaatgaatgcagaaaatcttacatgctgtgtactattaatattataacagacgatccaagtccaaaatctgaccaataaagcaaccattttatcaagatagagggattctaatgggagaggggattcttccctcctgaagtttgtgtgtccagtccccttaaaaaaaatgaatagttgtcttttcttgtcatattaatactcgaaagtccatggtggtattaatgaaagtacactttattgttgcctttgaacttacggccaaggcaataaatcagaaacaaaaatagtgccaatgtgtcaaaatcgacatctgagagattcagcctcccatttggaataaatatgaatcttctaagctatcttgtttaatattttccatcatttagctacttcctatctccctcagaggcgcctgctgttcccattttagagttgacagtggcctgctaattttgctatgttcctaaaagttactgggtgtgagacattttcatcccctcctttttcctactgctggtgtttattatccagctagacaatattttatgcatatttaccgtgatgtctggaccgtacctgtgctccttggcagtttatgttgaagataactaaagatttttctctttgggaggcatcaaaatgatggtagtttgcttttatctttttatgttcattttcttttagtaggtgacctttctgcattaagaactgtttttatcttttactaccttttcttttctcctttgtggagacagcatgacatgtcctgaaggtcacctttgcctttgaaaaaggtttgatggaggaattcacaggtgactgacaagtctttgaaaagaatgggatctgctcacttctggtctttttggccgggaactcctgattggtgttaaggtggtaatttcccccatataagatttagaatcactgagtttgagctagatgaaatttttaaaatttctggttgtctcattagactgatgaggtgagttttcttcttcatatgaacagctagttaataacagcagagttctcactcagtgctcagtacttaattttccactgcaccacaactgtcttaactaaatgtgctgtatttttctttaaaagttaagagttctatttggtgttttcaggaatatacgtgaaaagacatgccatgttttggtaaataccatcagagttgtgtaaaggcgtgtactaagtgcaatcttaatttgtggaaataatcttcatttacccctcctaaaactacactcagtataaacactttcccataaggtgtgtgcagtaaaaatgttatattactccaacactggcaggagcacagcacagcagccttattggagagagccttataaaagtgattaaatggaggcattgagctcattacctttaagtttactttgtgctgacctttgttcctgttttgagaatctcatataattattaaaaaaaaaaaacaattaaaacgaaacggcggggcctagctgtgtataaatgatccttgctgaatatcttaaggttttttgtaagaaaaaagaaaaaccaacaaaaaaagcttattttcacattaaaatgaaacctcttttgcaacttaagaattctatggaaaagcagtttttatcatattttgtgtccatgcaccatttttcttaaaatggcttacaaaaaagaatgtaaacaatttgtgatctggccagttgtacttttagctcccagagggagagttggtggtattatgagttgagtaaaaaccatccaggggaacttgagggagcagtctgttgccagtaatgttccttgtgtgccattaaaccacctccagatgagtggaggaacatcactttttaattttttaattgtatttggaattgttgccgtgtactaagaacttgacctaaataaaatcccacaaagtataaaaaaaaaagaaaaaaaaaaaaaaaaaaaaaaaaaaaaaaaaaaaaagcaaaaaagaaaaaacaaaaagaaagagaaacaacaacacaacaaacgagacagaacacaccagacagcagcaccacaagcgcgcagaggcgagacagcacgagcagagcgaagcaaccatgcgagggcgcacagcgagtacgcgacgcagaagccagggggtcagccacagccgcagcccagtggtaaacgcgacacccgccgcacgcgcgttcgaccgacgcccaggc

SEQ ID NO: 7353 - DNA, 465 bp, Homo sapiens
aggatatcagacagctctggatataaagaagaagataggacaaaaactggaagattggttgaaagtatcttcatgttatatgccaagtccatgcagctaaacaactgtcctctcctgctggaggctacaggtttattctctggagtgtaaaatagaggatctctgggctggtagacagcaggcacagatcgaggtaaggaatcacatcagttcctgccacttccctccaaaaaaagataaaaatattgacaccaggacttcccccaatgaaatggcccagacagaatatcaagcggtaaagccaccaaccaactactcctctccatttttagtgtcctattcttaactatgagaaaacaaccaagggtcacaaagcatcaaagaaagagacaaaaacaaacaaatagataaaagcagcttttatgcaacagaggctatgcaagtagaagaaaactttaaaaaaaa

SEQ ID NO: 7354 - DNA, 2211 bp, Homo sapiens
  misc_feature (1330)..(1345): n is a, c, g, or t
gatagtgagccgggcagcctcttcaccggatggcttcttctggacccaaggctcccccaagcccggaacagcaagccccaagctgaacctaagccactcggaaaccaacgtccacgacgaatctcactttagctattcgttgagccccgggaaccgccaccatcctgtcttctcctcttccgatcctctggagaaagctttcaaaggcagtggccactggcttccggcagcagggctggcgggcaacagaggcggctgcgggagccctggcctccagtgcaaaggggccccctccgcctcatcctcccagctgagcgtgtccagtcaagcctccaccgggagcacccagcttcagctgcacggtctcctgagcaacatcagcagcaaggagggcacctatgccaagctggggggactctacacccagtccctggcccgccttgtagccaaatgtgaggacctcttcatgggcggccagaaaaaggagctccacttcaatgagaataactggtcgctcttcaagctgacttgtaacaagccctgctgtgactcgggggatgccatttattactgtgccacctgctctgaggaccccggcagcacctatgctgtgaaaatctgcaaagcccctgagcccaaaacagtctcctactgcagcccgtccgtgcccgtgcactttaacatccagcaggactgcggccacttcgtcgcctcggtgccgtccagcatgctcagctcccccgacgcgcccaaggaccctgtgcctgccctgcccacacacccccctgcccaggagcaggactgcgtggtggtcatcacccgagaggtgccacatcagaccgcctccgacttcgtgcgggactcggcggccagccaccagacggagcccgaggcgtacgagcggcgcgtgtgcttcctgcttctgcaactctgcaacgggctggagcacctgaaggagcacgggatcatccaccgggacctgtgcctggagaacctgctgctggtgcactgcaccctccaggccggccccgggcccgcccccgcccccgccccggctcccgcccccgccgccgccgcgcctccctgctcctctgccgccccgcctgctggtggcactctcagccccgcagccggccccgcctccccggaagggccccgggagaagcagctgccccggctcatcatcagcaactttttgaaggccaagcagaagccgggcagcaccccaaacctgcagcagaagaagagccaggcccggctggcccccgagatcgtgtctgcttcccagtaccgcaagttcgatgagttccagacaggcatcctcatctannnnnnnnnnnnnnnnacccaacccgttcgaggtgcgcgcccagctgcgggagagagactaccggcaggaggacctgccgccgctgcccgcgctgtccctctactcacccggcctgcagcagctggcacatctgctactggaggccgaccccatcaagcgtatccgcatcggcgaggccaagcgcgtgctgcagtgcctgctgtgggggcctcggcgcgagctggtgcagcagccgggcacctcggaggaggcgctgtgcggcacgctgcacaactggatcgacatgaagcgggccctgatgatgatgaagtttgcggagaaggcggtggatcgcaggcggggcgtggagctggaggactggctttgctgccagtacctggcgtctgcggagcccggggccctcttacagctgctgaaagcccctgaagcttctgtgagccaagccccagcctgcaccgtcgctgccccttccctgcctaaccctttcctgtctcgccttggaagcacccatgtctccctgggaaatggtacagatgactgggatacctggatgtaaaatatataaatatatatatagaaaatacatataccatatataaatatgaaagactaaggatgctgttgcccgtccacactcgtctcctctctgcactaagtcctccctgttttcttctgtaattatacacatttccagttccatgcaacgtcctgaggacagttctgtgaactgaatgcagcctggacactggcctcaataccttgtttaggatttcttcacccttttgtcaaattgttatttaaagaaaaaaaaaaagaagaaaattccattaaaattttttttggttgagtcatgaaaaaaaaaaaaaaaaaaaaacacagac

SEQ ID NO: 7355 - DNA, 476 bp, Homo sapiens
gctcgactttcaagaggctatattcataggttggggccagggctaggacttcaacacaactttttggacttcttggggggcgcaattcaattcataacagagaccttgagtaaaatactgtgtcaaagttgggggagctgaggctgaaatgagggctcctggtattgggagggaatggggcagtgcagctctaatcagagcccatgagagtggacctgtgggtcaaggcagctcttaccccaggagctcttggatccaccctgtgctatgttttggagatgtgtcatatcattcaaaaaagccaaaagaggctgggcactgtggctgacacctgtgatcccagcactttgggaggccgaggtgggagaatcacttgaggccaagagttcaagaccagcctgtgcaacatagggagactccatttctaaaaaaaaaaaaaaaatttaattacccaggcctggtagcctgcctgtagt

SEQ ID NO: 7356 - DNA, 1694 bp, Homo sapiens
  misc_feature (1520)..(1520): n is a, c, g, or t
  misc_feature (1576)..(1576): n is a, c, g, or t
  misc_feature (1639)..(1639): n is a, c, g, or t
  misc_feature (1647)..(1647): n is a, c, g, or t
  misc_feature (1660)..(1660): n is a, c, g, or t
  misc_feature (1686)..(1686): n is a, c, g, or t
tttttttttttttttttttgcagtttttcctgtttattatatagttattctaaggtggtaagtgtcacaaagttaacttcaagaggaataacatggtccagtgtgaaacacaaggtacaacattttacaatgaaaccacagcacaaagtaactgaactttcaaaattgggtagttcaatgaaacattttgtcaacccttagctctataaagctctgctgatggacttagttgatggatttaaaaaatatattgctgtgtcaaatgttttaacacaaaatgtttttttttaaagagaatacacatccaatcaactgaaactgtgagcagaaagtatgtaacctctttataaaaacgttatccaaatttacaacattcataatatatttcaaagtaaagagttcttagaaaaaataaactcaattccttgcttactgatgagtatcaactcctcaaaaacacatcacagaaagttaactttcatacttctttgcctataacttttagatatctactaccctggcttcaaaaacattttgtggccatatataatacaaacactcaggtattacatgcatcatttatactatcttggaatttatccataatctactaaaatgaaccacattttaaagacatcatatgtcatgcacccttaaaaattatagtgagggcctctgatttcctcttttttccacatgcataacaggcacaaaattacaaatatttttcaactgacagtacaacacgctatatcaggcaatgggtatatggaattcagtgtatctctatttttcacactatgcctctgtgcaatatttcaatcaaagacagttgtcactaacatgcacaaatagagatgctagcaaggttaatgcaaatatgcataaatgagcaaatgtatgcatatatagtaaattcattcgattaacattttcaagtgtgtatatatttatgtagatatatacacacatacagcaagtatattcaaaatttgtcaacagtttagagttttgaaagaacatacagaatcgccttacaggttatctggctttgttattaaacttacttcatatcaaatatactctggattttcttctatttatgttccaacattatacttgacaatctgcaactgtatcaatgtttcatttttttagagtatagtgattggcaaccactacaagccatccatacacacacaatagaaaaaaatcatagtattcgatcttgttaataattgaaaacaaagatatatcaatataaacattaatgttacttatatttaatagttaacacaatattggatttagctgaatttcaatttttttataaatcagtatatctgaatattttgaaccatttgccataccagttgagcaaactgctttttaatttaaacatgccccaactaatatgtcacagagtaacactttattacatgaagattttatgtataattccacaagagccagtaacttataaggctgtatcacaaatactatactttactgttgatggnttatacacatacacagatacttacagaagcatacccacatacacaccaagcctggnaaatttacataaacacccaaacacctgtatagatatatggccacatatgaaaaatttagcagnccaagaantaaaatatgtggnattttcaggaatattattctatatantcattcac

SEQ ID NO: 7357 - DNA, 3480 bp, Homo sapiens; identical to SEQ ID NO: 6047

SEQ ID NO: 7358 - DNA, 970 bp, Homo sapiens
  misc_feature (55)..(56): n is a, c, g, or t
  misc_feature (113)..(113): n is a, c, g, or t
atctaaagtgtctcccaggaccacgtttaaggagtttgcagagaaatacggccgnnatcagaggttccgacttgttcaaaaaaagaaaggaccaggagcattttttcaaccanttcatacttattcttaagaaacgggacaaggaaaacagactaaggctgcggaaaatgagatgagtttgtgaaaaaatgcaataagcccgggggttgaccctgggcgtgccgggggcgagggggtcacggtggagacggacacgggcgtggggcggccgagacctgcacggcccagcgggcaccggcactgcggggtcttcgttctcagaggattactgtttcatattgaagctctctcttttgtacattctgatgttggagcatttctaatcaccgtgatacgtcgatcccttaattgttttaattatgcaaattacttgtaatatacacaaattatcaatccactgcaggactgtggggaagcaggaacgggagcctctgtaacaatctcaaggcatttgtgtcatcacctaagacgattggcgaaaacttttctgaaaacctttgtgaattacttcgttcctccaggattcccgcagtgttgaggaattccttactctgtccctaggtctcagtctcgtttctgagtagcagcaatagggttttcatcattcatcatagtgacaactgtgagcattccacacctggaccgtggatcacttacaggtttccaagggtggccgcgcgttcctcccagaggggcgtcccggcctggagcagggagccgtgttggttgccaccggtcctacttcaaaagaattattttgtacaaaatcatcatattaatatttgagttatttttattgtatgcccggagtttgcatgagattttttctcatcacctttgtataaaaaatttttaattttttttaatcaataaatattttaaaccaaaaaaaaaaaaaaaaaaggaccgg

SEQ ID NO: 7359 - DNA, 816 bp, Homo sapiens
tttttttttcacattttaaatgtttaggttcatcaggaagtggtcttactgtaaacgcactttccaaagacacatgatcatcttggaatgaaacctggcaatagcgcatatcttttacagatgttggtacttgcacatcaggaagcagaccctgtagcaagtgttctttgttaatctcaggagtccaattaactttaattttttctgctaaagctgatgttatattgatttctctttctccttcatcatacatttgaaaaataagattatgcataatatcacccgctatccaattaacctcatcctgatgtttgatctgaattgccttttgtcttgctacactgaactatagtagtctatagcacctggctactgggaagcaacttaatagtcttctccacaggtgccacatctttacaactaggtatttcaattcttgctttaagcgtctggtcttttttaatattctgaacttgaattgcagatcctgttaaaatactggttccagaactactgcaatctacaacatagactggaaggtttggagcacctgaaaacttacaatgaacaatcaattttggttgtgctgttatgttgtctgattcatctaaaacttccacctgaaatgggaaagctgttccattttctataactaaaatttcagaatcaggtttcactttcagtcgacgagggtgaccaggtagtaatctaattttcaaaatctgtgagtcttcttttaagccaggcagagtaaccttcagattataattcttgccttgacaagagtttacagggcccttggctgtaaccctcgtg

SEQ ID NO: 7360 - DNA, 2056 bp, Homo sapiens
agcgggaggcggcagcggctgcagcgttggtagcatcagcatcagcatcagcggcagcggcagcggcctcgggcggggccggccggacggacaggcggacagaaggcgccaggggcgcgcgtcccgcccgggccggccatggagggcgcctccttcggcgcgggccgcgcaggggccgccctggaccccgtgagctttgcgcggcggccccagaccctgctccgggtcgcgtcctgggtgttctccatcgccgtcttcgggcccatcgtcaacgagggctacgtgaacaccgacagcggccccgagctgcgctgcgtgttcaacgggaacgcgggcgcctgccgcttcggcgtcgcgctgggcctcggagccttcctcgcctgcgccgccttcctgctgctcgatgtgcgcttccagcaaatcagcagcgtccgcgaccgccggcgcgcggtgttgctggacctgggcttctcaggactctggtccttcctgtggttcgtgggcttctgcttcctcaccaatcagtggcagcgcacggcgccagggccggccacgacgcaggcgggggacgcggcgcgggccgccatcgccttcagcttcttctccatcctcagctgggtggcgctcaccgtgaaggccctgcagcggttccgcctgggcaccgacatgtcactcttcgccaccgaacagctgagcaccggggcgagccaggcctaccccggctatccggtgggcagcggcgtggagggcaccgagacctaccagagcccgcccttcaccgagaccctggacaccagccccaaagggtaccaggtgcccgcctactagcggctggcaggcacagaccagggctccaaggccaccccaccaacgcaggccccagggtctccgggacctcccttgggtccttccagctcagtgccgcggacagagtaggtggccgctttgcgccatccggggccaagagggggtggacccgcgtgtctgggctgcccctgccaagttcccccagtccctcagcacctggccccaggactgaggtcctgagaaggggatagcactgcccaggacgtgtgtccctagcctggaatggactggcctggggaaggctttcccctcttgggccacacctgctcactctggggttgggggtccagctgccctctacgatcaggtgcaggggctgcccaggacaaagcgggggcaggggaaagacaccaccctcgccccaagactggggatcctggccactgttcccatcccatgtccctgtgggtagtgactgtctcgtttctgtcatggtggtgcgtcccgtccggagccactctccactttctctcacaggctgctagaacagcccagccctgtcagtgttgtgatcatggtccagtcttcgggtttcacctcctagtactccacaagctgctcctctctctgtggccccggcccctgcccaggtgtgggtggttctggccaggaaggcacaaggtagctgtgggccaagacaccagccctgtcctagcccttcagtaagaccttgccaggagaggagaaggatgcctgggtgccaggcaagacaagcccctcagcaggagagaggcccagaggctccagctggccaccgtgccccacaagatggcccctgtgtggttccctttaccttggcttcctggcccagtccctgcctctccacctgcaccctgcttcctggcccagtcccaggttggagtccctctgcatagctgactactcatgcattgctcaaagctggcttttcacattaagtcaacaccaaacgtggttgccacatttcatcagacagacacctccctctggagatgcagttgagtgacaaccttgttacattgtagcctagaccaattctgtgtggatatttaagtgaacatgtttacaatttttgtatatatcactctctccctctcctgaaagaccagagattgtgtattttcagtgtcccatgttccgactgcaccttctttacaataaagactgtaactgagctgactgtgaaaaaaaaaaaaaaaaaaaaaaaaaa

SEQ ID NO: 7361 - DNA, 865 bp, Homo sapiens
tctcttcccccacccgcttcctcagtaccaccatcgtgtaccccaagtaccccaaggccgtctacaccaccaccctggattacaactgccgcaagacgctgaggaggtttctgtccagcgtggagctcgaagccgcggagttcccgggcagcgacgacctctctgatgaatgctgacccagcaggctgggctggggtcggaccggctttttttttttctcttcccccgactgccctggccaagctgggcgaccttacccttcacgtcattccagccccagaggagtctaacctagagatacctccaagcgcggccgggggaagagaaaaaaaagaaaaaatcactgcatctcataattattgagatctttgtgttgtaattttcaagctgtttttagagggaatatatgtcctggtttgctgctgtgttgtttccccaaagtctcaatcagatgaggcaacaaaaagaccaccagaattgcaggaaagcagcagcagtctgggatagggaggggggaggagagctctccctccgtggtcagtttgtcagaagaaaagcatggaaaaagtgagatttaagaaatctcagccacgggtgtcttcactgcacaaaagtggtgctaattcagtaaacagtgacacctgtgtgggttcaatctgtggagagttgagttccattcctttgtttttaaatttccacctccatttgtgtttcctattaacctaaactcttgtaattctctaaatcttttttcatgatataaaaaaaaaaaaaaatcccaaaccacaatttaagatgcctttttttaaaaaaaaaaaggttctccgtgttgccacctgctccgggaaggccaggccgatgggcg

SEQ ID NO: 7362 - DNA, 638 bp, Homo sapiens
ctgaattggttttaccatgtgtgtaaagactgttgtatgatttttgtagcacaacccttgaatacataaagcacgattggctccccagaaggcaggtgttggccaggcagtggatgcacggtagggcagtgtgcagccctgcatgcacgtggctggtatgccctgcgggcagctagctccccgcacacagtgctgtgagtctctggttcatgtcactctgtggagcaggggctgctccagcacaaagaggtttttgacagggaaaggcagagccagagtcagggcaggccctgggcgggctcctagagagcccaaccaccctctaataaggggtgctctccaccctatctgaggagcaattgggatctcctaggaagtgaaactgttacgtatgtcttattacagaatttccagtggagtgattctggaagaaatgtgtatggcatgttgtgactgctatgtctcatgaaatatttacgtttttatgtaacttttttccattttcagatcatcttttattttaacgcaaaatgacaatatatttttcaattaatttgcccaatatctgtgtttaaatgttttctaatgcacacacgtgttttaaactcattaaaaaaatatgacttagaaaaaaaaaa

SEQ ID NO: 7363 - DNA, 1215 bp, Homo sapiens
  misc_feature (169)..(169): n is a, c, g, or t
cctcggaaaaaaatgtcgtccaaaataacatatcttccgtgttgacccaaaaaccttttctcgataccccgcaaccaattatttccggacgcgattgtttttcacccacaccacggatttacgaccccgttgaaaaaatttgtgataaagttctccgctcttagagccncttttaaaatcttctctctatataggggttaaatgttgtttcccccacacaatatattgttgtcccccccccccagatgttataagggtctcctctctccccaaagatgctctcccaccgtttagcccggtttctcccccctctcccacgccgttttgtatacccccgcgcgccctgtcgccttgcgctcttataatattctggcgctcccctctatatggggcccgcccttggtgcccagaaaacctctggggatcccgcgcttaaccttgggcgcccccctccggggatatcatctctctttacccccccccccctttttttttttttttttttttttttttttttttttttttttttttaaactttggcatttttattcagacacgtataaaaacaaaacaaaaaacttcagtgatacaacagacgttttcccttagttccccatccaaggggacagaggtgtgcagctgaagctggatcttttttctgtcctacctggaagcttctcactgctggatgagaatggcttctaaaagtggatcttggggatccttgtgaatttgccctcggataaggagtgaagatcatttacggcacatgtggattatggtttacacaaagatgtccagttatttttccttctgactacccccaccaccacttcctgagatgagatgtctaggtataggaggatgtggctgttggggttagacttgattcagtgcaaaaacaagaaacagtgccccttaaacaagggctgtaacttaaatcagtttttcttggcaccttacaataagagcacatgcacaggaattgggaggattttgcatcctggatctactgcttaatttatttcatctctttaaggctcagtttcttttttttttttcccctgtagagacagtgtcttgctatgtttccataggcttatctctaattctgggctcaagtgatcttcccatctcacgcctcccaaaagtgctggctgggattacaaggcatgagccacctgcaccccagttctaaagttttttttttttttt

SEQ ID NO: 7364 - DNA, 399 bp, Homo sapiens
  misc_feature (7)..(7): n is a, c, g, or t
  misc_feature (17)..(17): n is a, c, g, or t
  misc_feature (37)..(37): n is a, c, g, or t
cgctctngaactagtgnatccccccgggctgccaggnattcggcacgagagtatgttaacaataattatttataacaatattttgtattggatagcacattccatctgaatatttcaaattggcatggtcccttctaactggcattaattcattcatcttgcatccccaagtaataaagttattcccatttttaaatggagaaatcaagattcatgcatttcagtgacagatgttcaaattcagaagaaaatctctgtttgagtttgtctttgccttgtaatacgtatttgtcactaggcctccattattaaataagaaattgaaccttgcatttagtcctatgatctttacccacccaagcacggaggtaacaaggtaactgtgatttaaaaaaaaaa

SEQ ID NO: 7365 - DNA, 1444 bp, Homo sapiens
  misc_feature (21)..(21): n is a, c, g, or t
cggtgggcgcctgtaatcccngctacttgggaggctgaggcaggagaatctctttgaacctggaaggtggaggttgcaataagccgagattagtgccactgcactcccagcctagataacagagcaagactctgtctcaaaaaacaacaacaacaacaacaaaacaattctatgactgaaagtgactaaaaagctggctttatgccattaacactctgtactttgcagccaatcagaactgacgcagtctgggtgctagctgcttcaaaagcaacccacaccacacttttaccatttccatacatcaactgctgagaatatgaaaatgcacagtgacaggttttaggatcctgcttcaggatttccttttcctggtttggtcactagagttggctatttatctgtttataaacaatagctattttatcgaatagtttagagaccactattaaatatgtgactgatgaaggatctgtgaattttttatatatgttctaagagttaccatttgataccttttaaaaaccagcagctttctactatattcatgtaagacagcatgaataaaaccattttttgatacagggttttatttggctttaaactcaggaaccaagttaattatgccagattgaactttgatttttactaccttttcaaagatattttaaaaagtggattactacatatgatttctttggagcttacatttctttacttcacgaattctatgtcactgttacaagtttccattctgatggtttctatcacattctgactccatctgcggcctcattaaggtgatagaaacatactaggaataaggccgcagatggagtcagaatgtgaaattacaaataatcactggatccatctactgttttccatcaccttccccactgatgctctgggcgagagagtgatgtgtcacttcaactgtgtgtaatatgtcagacacgtcctacaataacaggcgtcatatttgtattatttttagtttactgtagaaaataatgtcaccgccaaaggtgatgagagtcacgttttgtaggatctgttttcttatacttaaagacagacttctgctacggtaattgccagtattcatggcttcctttctgtgtcagaagagaagggatctgctttctcttggctgatttcacatagcattggtaatagacatgcatttctctttctaaaggggagtaactttttaaacccttcctgattttagcctggcaatgtaagtgtccttaatgtgactgttttgataattaaaaaaaggtatataatttaaaaaaaaaaacaaaaaaaaaaaaaaaaaaaaaaaaaaaaaataaaaaaaaaaaaaaaaaaagaagaaaaaaagagggagaaaacaaggaggggcgcggggaaagaaagagcgggggcaagtaaagagggacaagggtagaaggacaaa

SEQ ID NO: 7366 - DNA, 1478 bp, Homo sapiens
agcggatgacccgcttgacgctatgacagcgggaaacggggggcgcgcccgtacatagggaggctttaaaaccttgaggtgattcatcttccaggctctccttccatcaagtctctcctccctagcgctctgggtccttaatggcagcagccgccgctaccaagatccttctgtgcctcccgcttctgctcctgctgtccggctggtcccgggctgggcgagccgaccctcactctctttgctatgacatcaccgtcatccctaagttcagacctggaccacggtggtgtgcggttcaaggccaggtggatgaaaagacttttcttcactatgactgtggcaacaagacagtcacacctgtcagtcccctggggaagaaactaaatgtcacaacggcctggaaagcacagaacccagtactgagagaggtggtggacatacttacagagcaactgcgtgacattcagctggagaattacacacccaaggaacccctcaccctgcaggccaggatgtcttgtgagcagaaagctgaaggacacagcagtggatcttggcagttcagtttcgatgggcagatcttcctcctctttgactcagagaagagaatgtggacaacggttcatcctggagccagaaagatgaaagaaaagtgggagaatgacaaggttgtggccatgtccttccattacttctcaatgggagactgtataggatggcttgaggacttcttgatgggcatggacagcaccctggagccaagtgcaggagcaccactcgccatgtcctcaggcacaacccaactcagggccacagccaccaccctcatcctttgctgcctcctcatcatcctcccctgcttcatcctccctggcatctgaggagagtcctttagagtgacaggttaaagctgataccaaaaggctcctgtgagcacggtcttgatcaaactcgcccttctgtctggccagctgcccacgacctacggtgtatgtccagtggcctccagcagatcatgatgacatcatggacccaatagctcattcactgccttgattccttttgccaacaattttaccagcagttatacctaacatattatgcaattttctcttggtgctacctgatggaattcctgcacttaaagttctggctgactaaacaagatatatcattttctttcttctctttttgtttggaaaatcaagtacttctttgaatgatgatctctttcttgcaaatgatattgtcagtaaaataatcacgttagacttcagacctctggggattctttccgtgtcctgaaagagaatttttaaattatttaataagaaaaaatttatattaatgattgtttcctttagtaatttattgttctgtactgatatttaaataaagagttctatttcccaaaaaaaaaaaaaaaaaaaaaaaaaaaaaaaaaaaaaaaaaaaaaaaaaaaaaaaaaaaaaaaaaaa

SEQ ID NO: 7367 - DNA, 879 bp, Homo sapiens
tttttttttttttttttttttttttcaaacataccaggatttttttatttttcagtgtaaaaatcaaacatgataaacctagaaaactatcagcagggctatttcttacagggttccagcaagggttagcattgttacatttcagaagctgactttctttaaaccatctttacagaggagtaaacttcacagttccacacatggctgggctccaggtagaactccataggagtgacgagggaaagtcaccactgggcagggagggcatttctgagaaatgcagatgagaggagacagctgtgagcatcaggctgtgtcaaaacccagggcaagggctccctcccgccttccctcccagtgggaaggccaccctgagccccaaaccacattctgttccttcctcgtcattctgcagacaaatggacatccacagaccacacgtgtggtggctttggcaaccagaaatttaaaataagctatggtttttccagtagccaaaatgatcctgcaccaaagctcatagactgagaacctgagcatgcaaaaccacagtctgggtgaagggatgtctgctttgtaaatgacctgctaattctttgcaacccacaagtaatttggtttcttgtgaacccacagaagcaggccaccaaaaagggccttgtttgctagcctggaggtttacattgaggcactggcgggggggatcagtcattttttaggttgcccctttttcctaacatgttaaaatgtgtgttctcagtcttttcaagagaggaagaagcaaagcggcacttacagagtgtgagatagacacagatctgtggcgagggattggggaaggtgggtggcatcctcgtgactctcctcgtggctttctgg

SEQ ID NO: 7368 - DNA, 3179 bp, Homo sapiens
  misc_feature (488)..(515): n is a, c, g, or t
ctaaatacttgtatagataaatatttcttgtatattcttcccatacaagcaagacttgaatacagttgtagctagtcccacttttataataaaagcttccaaactctttatcataaactttgtctgtgagcttgggaatacagagaaagcaagttgatcattctgagacccttcctcatttgccctgaatcagttccccaagattggactgtactttaagctagttgttgtagcagtggtggttgttgttttatatcttgagatacttctagaacattctagaaacagggtattctaaaggcttactttatatgccatcctttttgaaccctcttattttagaaattattacacgtgcacacttatgatttcaaccttgtaaaataatttcaaattcatttcgtatccacattttactgcagtttccctatcatcatctcaatagttatagaactggttgaaattaaactgttttgaactaagaagtnnnnnnnnnnnnnnnnnnnnnnnnnnnnttttttttttttttttaaagagtgttcatagataaactctggcataaagtttgtaaaaaagcaattttttaaaagcaaaacgtataacctcaggtacaaaaatattgcatgcattagtattgcaaatttgcctactcaaatattaaccaaagcatgcaagataacttgactgaatttaaatttacacagtgcatgattaagtctcataggttagcctgttgttccttgcctctatacaagggagcatttttatgaactttgtgttacagtttttctatttgcttttcttatcctatccttgagattgttttcatgctatcacactgaactttacagatattcacacatctggtttctacagtgttaccagtgccaaactaatcctctgaagaatctgggacatctaaacactttttcaaaaaccagttgaggcacaacagatcccaaacttaaacaaatccaagtgtctgaatgctactaaactaaatcatgttgactgcctcagcacataaaggttttgactttaaattcttaataatgcatttcaaaatttttctaaaagtttgggaataaattagaaaaactgatattctaaataaggcgaggaggttggggtaatgtcaggcacatcaaaatcatcacacaacgaagtagatatggggccttaattttcataaatgtcacatagcaagtgtgtggggtatcacaacattgttctgatacagccctgtttgtatggtagttgagctgcttgggctaaatgtcccttgagaaactggacttgatcaacaggtctaaaaacactgatatttagggagtgatgaggtgatttcacggtcactcagaaccaactctgaaatcttctcactgccttttcccataacccctattttatgaggagaccagaaagggagagagcaaagctcagtgagaccatgtggtcttacattagtaacagctttgttactcactccatataccccggtaccctcacacacataccatgagctcaaagacagaattctacacataacacacatagcaaagacgattgtggggaggcattaaacagttaagaggaaaaaaaaaaacacagaaaattaaactgtgaggtttaacaacctctcatgtggtattttgccttgaacgaagtttccactacctgcagcttctgcagaaataccaaaataacacagtctagagacaagtgtcccaatgtcagaactgttttctcaggaccttctctataagagaaaactaacttgcaatgctgcagaatgtcagagcaaaaccctgatgagctccgtgggatacttaatagaagcctgcactcaaaataatattaagatggaaacaacaacaacaattaggcagttctttgctcaactataaaatgtgtatcattcattgggggagggggaggggtcgtgttctttggatttcttggaaagggaaatggtataacacaaaaaggactaagaggtatacacactcagctcggtaattcgagcatttggcattttcactgagatatatagcatttctgcatggataccatacaagaattctgccatgtgagaaatgtgttcatgatggactacattaccagtagttaagggaaatacagcaaacttaagtttttaccaacttcctttcatgttccctatatatcatctaacccaaactttcaatttacattgcccaaatttgtttacattggttgaaaaaaaactgattaatttattaaactttttacaaactgtaacaaacatttaactatttagaaaagacatttctacatattttatatatctatgaatattgcatctctaatctaatctaaaaatgttgttttgagacaattcttctgtgatgcttcctcctcatgctcataaatgtttaaagtcttgggatttcattttcaggctgaaatagataacaagaaaaaaatttaagtttaaatgtttacattgcgttactaaattaataccaattcaaattaagtgacctatagtaaattaatggcaatgggggggaggggattttaaagtgattggcatattatgtgatactgtatcagtgatttagtgaaataatatgtatcatagcacaactctgttgggtattaaggcttcatcttagtatttccctgcgttgctctttgaaataaaattactaccataaaaataacctcttatcatattgatgtgtttaatttactcagttggcttctaatttgcgtaacaagattaaggtagtatttttgtactattattggaagcatgccttccctttttcacattattaaattgtatttatatttgtgcaattttaaactatgttttcaaataaactttgtctgcggcttcgaggtcttttcaggaatctttcaaaatgggatttggggatcagaactccttctgatcaaatggaatccaatttgtactactggctaaaggtccttttattaaatattgaatatcactacatatgattttgcatgagctatctggaaatcaggaatgcatttttggatataaaacaaaactttaaaaatcttcctcctttgttaattttttaagactaaaatattatttaacctgaaattgaattttgtgattctttttagaataaaaatattaaaataaaaaaaaaaaaaaaaaa

SEQ ID NO: 7369 - DNA, 2873 bp, Homo sapiens
  misc_feature (2)..(59): n is a, c, g, or t
annnnnnnnnnnnnnnnnnnnnnnnnnnnnnnnnnnnnnnnnnnnnnnnnnnnnnnnnngtggggggtgttggcgggcccctcgctctcgcgtttttgtgtttttttttttttttttttttttttttttttttttggtgtttgtttggttttttttttttgtttttttttttttttttttttttttttacatttactaaaagtttatttcaaatctgcctccaagtccatgtgttctgaaaaggacagagggggccttggagtgcagccagatggaaggactttgaaggctgtccaagtgctgctttcagagtgcaccaagtttttattgtccctgactgtggctccctgcctgtttgtcaggcgggagcctggagcctgcacagggacagagctggtttcatccggcactccctagccctggacaccctccttgtctcgcctgccctcctgcaggccttcactctcccctgaggctgtcctggcccggactgtggggagcacctccaccccccggagcaggtgcacacccaggtaagcaggtccaggggctggggtgggcagggctagcttttggatcctgagtgtcactactctctcctcccagggatgccctggacctaagtgacatcaactcagagcctcctcggggctccttcccctccttttagcctcggaacctcctcagcctgtttgaggacaccctagacccaacctgagccccagactctgcctctgcacttttaaccttttatcctgtgtctctcccgtcgcccttgaaagctggggcccctcgggaactcccatggtcttctctgcctggccgtgtctaataaaaagtatttgaaccttgggagcacccaagcttgctcatgtggcaacatggcccttcctgtccctttattgatgtcatccagggtcttaacgcccctgaggctgagccctgctgcagaacccagcgctcctggccttgggccagcagctgaagccccatgctgtgtggagcaaagaggtttcctgagcaggcacatcccccggtgggtacctggagctgttgggagtatggcactcaaggtggagggcaggcacggcccaggggtcccaggatctgaggccgctgagctccctgtgtcagtttcctggaagaagcagctgcagcccttgtgcctgtggccagctggtacaagacgggtccacgcccccttggtccttttgtcctgaatgccttactccatagtctctgggcagagggagccagggcgggcaagcttgtggctgctgggagggctggtatgcagggcagaaagatggagatcaggaagactggccacaggcctggtgggaggaacaggatagggtgaggaggctctgggctggcggcctggcaggacttgaactctcagagcaagacgtgaccccagagtccctctctggtctaaccccacaggtcacagagggtaaagaggtcccaagagggaaaggtttccttccagctgacacagtaaaataggagcttggagggaaaaggcagggaaggaagttggagcgccacggcgtgggtggaagaggtcagtccacagggaagaacgggtgaacagggctcctgctgagacatctcatgagctggaagcatccaaggagccagccccttgcagacgagttgggaggaacacctggtgttgctaactctaggaggctgctgtgggcaggctggcatggcagctcagtcccggggacaggcgtggtgggcagcccagagcaggtcgggcacgacgccggcgtgcagctgcaggatggagcccacgctcagcaggtgcatgatctggtgggagttgccccagtagtcaaagcggccaggtccccagcgctcgggcagacgggctacatttaccagtcccccaagcagcgccagtgcgtccatgcgcaggtagcagggcagggagcctggagcccctgaacccagacccactccccgggccccaaataccagtaggcgggcagcagcctgccatccaaatgcccggagccgagcactggtggagggggcggtgagagcacgccagccggccacacccgacaacacagtgtagcccaccagggcagccgggcgcagccagggcctgcaggccagggtgcagtggatgatgggcagggccccaagggtgttgacaaggcagaccccacacatgtcaagggcgaggagccgggcgtacacagcgctgcccccttggtggcacataaagaggtgatagagcacggagcctgcagggggtgcaaggcaggccacgcaatgtgtgcctcccagccagccatccttgcccagctgaccccagggcatggtcattggcaccagcaccaggaagcccagcagggccagcccgtgcgtgtagatgttgcccagttcgttgtgcaggtagaagaggctgcgcaggcagcccgagccgctgctggcgggccggtacccggtcagcacgaacttattgaactgcaggtgcggcggcgagctggcccagtccagcaggcgcggcccggccaggaacgccatggtccgcaccgcgcgggcagcccgtgctcctgctgtccccgagcctcctcctcagtggggccgcagcgcgggaaggccggacgcgtggcgcccggcgcccggcgcccacccattcgccctgcgctcgatcggcgcacgcgctggctagggggtcccagcccgcgcccctccggcgctgcgcacgcgcgagtccgtcgcccccgcgccggggcggaggctggggacgcaccggacgcctgagcgcactgcggtcggctccgccaaggcagacgcgccgcatggacagctcgcggcggcggcgccgcggtggccggtagtccctctccgct

SEQ ID NO: 7370 - DNA, 2859 bp, Homo sapiens
ttttttttttatgtagagagatatagtatagcttttattttttttttgaaccaacccaacatttccactggcaactgtcaacatagcttatgacatgagcactgtttcttttttaattatttttttcttaaaaaatgtgtttaaaattaacaggtgttttttaatttcttcccccccccccttagaaaatgtatttatgtcaatgcagaaagcctaaagatccgtgggcagtttcgtgatgacatcttatgtctgtttatttgtgtgtttgtgtgcgtgttttaaagccaggtccttcccacattcgttgagaaaaggtctgtagggcacggagatctctttctccaaaaacccaggctccaagggattatgacaactaagattcctcttactggagcaagaactaccccataggctggaaaaatagcttcatgaagtttaagaacaagcaggaacatgggagaaatgaggaattccagttcctatcttgtaaaaatgctttcatatgtgacctgagggaccaggagaggtgaagggagcccctggttctcttataaaatctctaagtttttacaccacttcaagaaatatagtcagccctctttgtatagagcattaggaagcaagagcgtggtgaagctgacatttctcaggcacattgacatttaaaatacaaacttttctcttaaagatctcactggttggacatctcttctctcctgcctcaggtacaaagccaaagataatcaagaaggcctgtatcccttttgttcttccagtagccctttgtcgtcacacaccattcctatttttgtcccatctcttctatttggcgggtcttcctgcagaaggatacacaagtggacactgacacaacaagacacacagaattggaaaggcttgggcaaagagggacaattgctttttgtatctgacttgattcaacataagcataaaaagctcctcctgctccagttgaagctcctgtaagatctttagtaccctgcgtgggtgagtgagcttatttctaccccaacaccatcactcctcccaagaactcagagaaaacagtgagatggggaactggatcttgatggagccaagaggtggcaggagagcatgtgtctaaaaattcatgtttctctctgttggctcggacctggaattcctttgtggcacctttttcactcacttcagaaaaaaaagacaaaacaaaataataagcaaaacctaatggcaaaacgaaagcaaccacaataatgattacaatgaaaaaaaaaaccccaccccagccacatgaatgtgactcattttcacgtcttgtcagctgagtgagataatagggacatatggaattgggcagagaggagaaaccctgcttccaaagaaatgagaggcaaaggaataatcaaaagatggaatagaaggaggcgaaaggctctgacctttgctttgggtcagggatatgagggggagatggggtggaggtggatttgttgctgttgcttgtttgtattcaattaaatactgtgtaaagtcggtgattcctccattgtttgattgattaagactttgccctttcagttaattgccagggcctaagttgggtgaagttcctggggcttaggtcctgatgctgcctctccagggcagtgcagtcgggagagatcactggtggggaagtgcccttctcttaggagaagtcctaggcctgccctgctggaggctctgttgtgtggcttagaaccccttgatgtagcaataggcctctagtgtggcaaagagtatgtagaggagccacaggctcacaaagagccatgttgtggcgagcttgcagccacgggggccaccaagctcccctcccaggtgcggccgccttcggtacaagagcacgctgatgcagacaaatgcaaagatggtgaagagggtgacggagaaggccagtgtgccggccgacacgtggaactcctgtccctgcagagcccagtagatggcggccacggaccaggccaggccgatgcccaggaagacattgacggcgttgctgcccgtcacgttgccaatggaggcgtctgcatatacatcctggagggcagcagctttgctggcaaacgtatctgggacagaggtgccaaatgccacgaaaacaacagctgtgactgaatctttgagaccaatggtgcagccgaagtgcgaggccaggtccccaatgatggcggtgagcatgccaatgatgaagatggagacggcgaagcaggcccagccgtggcagtactctgtggggggcacacaggcaaacagcaccttccagaagacagtcaggaagtgcatgacgtagtcaaagcaggagggcagcctctcctccccggattcatcctcatcctcatcccctgctgcactgacggtgatggcctccatgaactggtccctccaggaatgggtccccacaaccaaggccaggtttgtcttcttgatcagtttgtccaccgtagtcttgaactcataggactcttcaatgatgacttctagtttggggtgttcacccaatactggctttcccatctctgctatcctcttggcctcctcttcttccatagtcagcttcctgtctgtcacatctctttgagcttccgtttcttcagcagttacctggagatgataacattcacattgggttgtcgtgcgggtgacatgagaaagcacaggcagcaggctcagcaagtgatggttccctttccttcccctctttccttgaccccttcctttgacttatccaccctcctggctgccagttatcgtctggatgcctctagctgtcattccctaggtttttgctccctgctggaagagttgaactcc

SEQ ID NO: 7371 - DNA, 1816 bp, Homo sapiens
cctgcgttctcctctgccgcagcctcctcatggggcgcgctcgtgtggttgctgtgccctgcgcctgtcgggcggtgcgggccccgttcgccggggtgtggctcgtcgtctgcgttgtctccacagtgctcgcgtttgtttcgccctccttgctcttgctgtttccgctctcgtctgttcgccgtctcgcaggcgtcttcctccgttcgctgtgtcccgctgccgtgccgccttcgcgccgcgcgccgttctcctgtctcactgtggtgtcctcgttgttgtggagcgctgcgcttgctgttttgtgccggttggtgccggtgcgttggtgcgtcggggttttgctgtcgccttggcgtgcgtgaagcctgacctgcgttctgtcttttctacgtttttgtctcgcgtcctacgtttcgtttctgtttgttgtgctcgttctttgttccttgtgtctttttgtgtggctgtgttaccgtgtgtgcatctctgctttggtcctatcagtccttttggggctggtgcttcgtcctcttggttgttgctggtagcctgttgtgttagtattgcttgcagtggttctgtggggactttattttcagtgggaaatatgcccctgtgccgattttgtgtttttgcctctttgcagtggggctaggacagttgattcaactaaggtatttttttcttttttctcagtcctaatttgaacaggtcaaagatgtgttcaggcattccaggtaacaggtgtgtatgtaaagttaaaaataggctttttaggaactcactctttagatatttacatccagcttctcatgttaaatatttgtccttaaagggtttgagatgtacatctttcatttcgtatttctcataggctatgccatgtgcggaattcaagttaccaatgtaacactggccagcgggcccagcaatctccatgtgtacttattacagtcttatttaaccaggggtcctaaccactaacattgtgactttgctttgagacctttcctctcctgggtactgaggtgctatgaagccaactgacaaagatgcatcacgtgtcttaggctgatgccactacccgatttgtttatttgcaatttgagccatttaaagaccaataaacttccttttttaaaaaaaaaaaaaaaaaaaaaaaaaaaaaaaaaaaaaaaaaaaaaaaaaaaaaaaaaaaaaaaaaaaaaaaaaaaaaaaaaaaaaaaaaaaaaaaaaaaaaaaaaaaaaaaaaaaaaaaagggggggccctttaaaaaatcccccgggggggcccaattttaccgcaccccctttttttttaaaaaaggggccccaaaaggggggctaattaaaaaaagggccgggcccgctttttaaaaaccccgggtgggggaaaaagggctcccttggggatttttggaaagaaacctttttttggggggggggaaaaattttggaacccctcccccccaaaatattaaccccctaggggaaaaaaaatttttttaaggggaataagggggaaaaacacaccgcaaaatgttttgggcgttagaaaatttttcttttcggggattttgtttttgagaaaatattttcccccgggggcgcgggggttcccatgtggggggggggatttataaaaacccaggccacgggggtttttttgggcccccccaggcccccaaagggggtgtgtgtgtgtttattatccccctatccccctttttgagagaggtttttttgtgtttaaaaaaaatttcacaaacttccccttgaaacgggaaaaaaaaaaaaaaggggccttttgttt

SEQ ID NO: 7372 - DNA, 7115 bp, Homo sapiens
  misc_feature (4839)..(4840): n is a, c, g, or t
agctggccgccggcgggcgtgaggcgccggagcccggcctcgaggtgcataccggacccccattcgcatctaacaaggaatctgcgccccagagagtcccgggagcgccgccggtcggtgcccggcgcgccgggccatgcagcgacggccgccgcggagctccgagcagcggtagcgcccccctgtaaagcggttcgctatgccggggccactgtgaaccctgccgcctgccggaacactcttcgctccggaccagctcagcctctgataagctggactcggcacgcccgcaacaagcacggaaggttttaagcagagccgcaagcgcagggaaggcctcccggcacgggtgggggaaagcggccggtgcagcgcggggacaggcactcgggctggcactggctgctagggatgtcgtcctggataaggtggcatggacccgccatggcgcggctctggggcttctgctggctggttgtgggcttctggagggccgctttcgcctgtcccacgtcctgcaaatgcagtgcctctcggatctggtgcagcgacccttctcctggcatcgtggcatttccgagattggagcctaacagtgtagatcctgagaacatcaccgaaattttcatcgcaaaccagaaaaggttagaaatcatcaacgaagatgatgttgaagcttatgtgggactgagaaatctgacaattgtggattctggattaaaatttgtggctcataaagcatttctgaaaaacagcaacctgcagcacatcaattttacccgaaacaaactgacgagtttgtctaggaaacatttccgtcaccttgacttgtctgaactgatcctggtgggcaatccatttacatgctcctgtgacattatgtggatcaagactctccaagaggctaaatccagtccagacactcaggatttgtactgcctgaatgaaagcagcaagaatattcccctggcaaacctgcagatacccaattgtggtttgccatctgcaaatctggccgcacctaacctcactgtggaggaaggaaagtctatcacattatcctgtagtgtggcaggtgatccggttcctaatatgtattgggatgttggtaacctggtttccaaacatatgaatgaaacaagccacacacagggctccttaaggataactaacatttcatccgatgacagtgggaagcagatctcttgtgtggcggaaaatcttgtaggagaagatcaagattctgtcaacctcactgtgcattttgcaccaactatcacatttctcgaatctccaacctcagaccaccactggtgcattccattcactgtgaaaggcaaccccaaaccagcgcttcagtggttctataacggggcaatattgaatgagtccaaatacatctgtactaaaatacatgttaccaatcacacggagtaccacggctgcctccagctggataatcccactcacatgaacaatggggactacactctaatagccaagaatgagtatgggaaggatgagaaacagatttctgctcacttcatgggctggcctggaattgacgatggtgcaaacccaaattatcctgatgtaatttatgaagattatggaactgcagcgaatgacatcggggacaccacgaacagaagtaatgaaatcccttccacagacgtcactgataaaaccggtcgggaacatctctcggtctatgctgtggtggtgattgcgtctgtggtgggattttgccttttggtaatgctgtttctgcttaagttggcaagacactccaagtttggcatgaaaggttttgttttgtttcataagatcccactggatgggtagctgaaataaaggaaaagacagagaaaggggctgtggtgcttgttggttgatgctgccatgtaagctggactcctgggactgctgttggcttatcccgggaagtgctgcttatctggggttttctggtagatgtgggcggtgtttggaggctgtactatatgaagcctgcatatactgtgagctgtgattggggaacaccaatgcagaggtaactctcaggcagctaagcagcacctcaagaaaacatgttaaattaatgcttctcttcttacagtagttcaaatacaaaactgaaatgaaatcccattggattgtacttctcttctgaaaagtgtgctttttgaccctactggacatttattgacttaattgcttctgtttattaaaattgacctgcaaagttaaaaaaaaattaaagttgagaacaggtataagtgcacactgaatagtctaatctacatgtaacacatattttagtatgattttctatactctaatcagcactgaattcagagggtttgactttttcatctataacacagtgactaaaagagttaagggtatatataccatcactttgggacttggtagtattattaaaaggttatttccttcactgtcaataaaagtccaaatgtttagcttaggtctgagagtcaaacaatgttaaggattgtcttaaagttccttagccagcaaaacaaaacaaaacaaaacaaacaaatgaaaaacgtttaaaaagaagaagaagaaaaaaaacaagaacaagcagcaacagctgttttgttggggctatagatttaagttaggcatagtcaatttcagaataactaagagtggaatatatgcatatggtgaaattataaccttgcccttttttatttgccctctgcgatccacctggctttttagaagtctgccgagtgagaaggccacagtatctcatgctgtttgcattacagaactgcagcttttctactctgaaaaggcctgggagcagaatggctggcctgctgtgagcaggagaggagattctaagaaggatagtcccccctacaacatactgtcatactgctgggttttcatgggtaggaaagcttgtcctgaccccagcagcaaagaggtggcaggtcgctaatgaatatatgctttataatgtccttcttcattgctgagagggcagccttagagctgtggatttctgcatcccccctgagtctgacccatggacacctgtttcattcactttagcatcacagtgacctttgtatgctctgttcagtctgtgtcaggcagtatgcttgtcctgaagagaggtttggctatccccaccccaccccaccccaccctgttccttttttatcaggaggacttcagagccaggcctgcagcattttgtttgaaaacacaatcagctctgacagttagacatgcacacagacgccatagctggattggaaacattgatgttttaaaaatttattttttttggaaatagttgcacaaatgctgcaatttagctttaaggttctatagatttttaactagtccaacacagtcagaaacattgttttgaatcctctgtaaaccaaggcattaatcttaataaaccaggatccatttaggtaccacttgatataaaaaggatatccataatgaatattttatactgcatcctttacattagccactaaatacgttattgcttgatgaagacctttcacagaatcctatggattgcagcatttcacttggctacttcatacccatgccttaaagaggggcagtttctcaaaagcagaaacatgccgccagttctcaagttttcctcctaactccatttgaatgtaagggcagctggcccccaatgtggggaggtccgaacattttctgaattcccattttcttgttcgcggctaaatgacagtttctgtcattacttagattccgatctttcccaaaggtgttgatttacaaagaggccagctaatagcagaaatcatgaccctgaaagagagatgaaattcaagctgtgagccaggcaggagctcagtatggcaaaggttcttgagaatcagccatttggtacaaaaaagatttttaaagcttttatgttataccatggagccatagaaaggctatggattgtttaagaactattttaaagtgttccagacccaaaaaggaaaaataaaaaaaaaggaatatttgtacccaacagctagaaggattgcaaggtagatttttgttttaaaatggagagaagtggacagataaggccatttaatatatcaaagatcagttgacatctcctagggaatgatgaaaacagcaggctattagaaaattatttcatatagttctcgtgttcttttcttttttttaatccctgaagggatgatcagtaacatagcttctcttttctgtactctagaccaccccttttcatcattttgctttttatgtctcccataagaaatgtgctttttagagcttcctaatgcatgtgttgcattattgcagcattagaaaaggagaggtagcatttttgctgaaatcgggcctgtcactctccaataaaggttctggcacttcaatgccaggcaggtctcctaaatgaacagaatgatctgtgtgagccgatgcctgcccttccagaggggccactgtccccagccgcagccaactgtgtcccacaggaatgggagcctaggtttccaaatcttgtgattctttaggagaaacatgaaacctggatttcgtgtgaaatgtcccgattgttaaaaagttggctcaattatttttaaaacattttgtaagccaacaaaagtctgtgggctgccagtttattacttttgtcttaaaacatgatcattgttctctcacggtatccttctgtcttcccgttgcaaattcacttttctttcttcctgacattgccattgagggctttgttaccacaagctaagaaactgagtttaacaggccagttanntgcaacaggtcaattacctttgctcctctcctgtgattcccaccatgctgtgaccctcagctgtctccctttgctgggaattctgcaccaatgtctcccctcaacccattccctggttggtcctactcccgtgtggccagagacatcctagcaaatccttcctcctattatatctgacactaatttcttttcaacagcgctcatgtctcttggcccagtcaggtgctgccaggtttagataggaaagtacatgtcccattttcatgggtgcccttaatgtggtccacgtcctatatcttattatatttactcatggctcaatgggggcctccagagaccctctcaggctgctgagctagactaaggaatgcatccactgtcatcacatgagacactgactctgtgacgacaaaagtacaaacagtctgaggctaagaaaggttcatctcacaacaggaaaaacaaatctcaacacacattagagataattgattcaggggttttctctcccagtctcccagcagggactgatttcatttctgacccactaggttttctttccagaaataggtagcaaggacaagaactaaacaatcccagccccacccagcaacacagaacacaggagtttgcttttggcttctcactctccaagtaaccctgaattaggcccagaatggctgaggcttggagcatctcctcagacagagcagaggcgacacctcttcaggggtgtgtggagtaaatagctcgaagagctgaagacagaaaaccagtttcacgccaggtgcgagagagagcataatggagggaagcccgctttctctctcctcttcttttctctttatttctttagagcacttgacttttttttctctctctctctagtattctaaactgaccccatgaccaactgagaatttatttttgtttcattggttgtttcacagaattagaacacacacgactttttattcctccattgcaaaatggaatcaagatactacacaagacctgtgctttcttcctttgcatgatttacacctccgcctgttttggtgctagctgtctagaacttctctcttggtttgaatctgattccttcacactacactagaagtttatttcatcttgttttgtctagactccagatacagagggacagctggactgaggacaagcaattccatctagcatagggtctctcagggttggtgcatccagccacatgggcagggccagtcacatctagtctatgtccccagagcccttggagttgcgcagcttagctgacttgactccaaggaaattagtacagaagtaaccactctattaagtgtgttctgctatgttcacatgcctgtagtacctgcaaaccatgccaggttcatctaaagacataggggaagattaaggactcttttggacagaccatgaattgaatttgctgccaggtgctgccagactgaatttggctgacagaactcccagcccaggaaagttccatgacaatgactgtcgcagaaggaaatttcccactaaagtcagtccattttcaagttttggtcttcagagacaaaagaacgtcccagccacctgattttgatggtgaggtaactctaagttgaattcaggctagtgttgcagtatagctttggcatgttcatgagtgagcacccagaatgtgttgaaccaacccccacccctaactactgactatgactgcagtgggtttttatggggaaaaaaagtgtgaaaagcaaaaagaaaggaacagagattttttatcacctttattgtaagacagtccatttatgaattgagtataaacacatacaaagtaacaagagattcctaagaaacgcaaatccttgagtttcacgcacttcatgttcaaccatttgctgtaatccagaggcagcctgtgaatcattctcatgccctgttttttttttttttttcctataatgttctgggtttaaaagccatcttttccacattttctgtaaataatggataatcattttaaaaatttttatttttagtgctgttttaacaatgtagatagatcataaatgtacttgctgaattcaatcatttttaacaagccaataaagtttgataattcaaaaaaaaaaaaaaaaaaaaaaaaaaaaaaaaaaaaaaaaaaaaaaaaaaaaaaaaaaaaaaaaaaaaaaaaaaaaaaaaaaaaaaaaaaaaaaaaaaaaaaaaaaaaaaaaaaaaaaaaaaaaaaaaaaaaaaaaaaaaaaaaaaa

SEQ ID NO: 7373 - DNA, 1244 bp, Homo sapiens
  misc_feature (386)..(386): n is a, c, g, or t
  misc_feature (388)..(388): n is a, c, g, or t
  misc_feature (390)..(391): n is a, c, g, or t
  misc_feature (411)..(411): n is a, c, g, or t
tcacaagagggccccccaccaaaccttgttttgccccccaatcattttaaagagggttaaaatcacactcccatttcaccccctaggttaattccttaaaaaggcccttttttcttttcccaaaaaccttccctaaggggaaacttttggggttcccaattttggttaagcatcttcaagggaagaaagcccccccccccacaagggaaagctccgaagccctccttccctgtcgctgtggcacagacatagcccactaacgggggcagcccacggccctgtcaggggaagctgctttacaccccccttttttgggggggggttggcttctcacaacccatcaaattatatatgtatatatatgtatgtatatatatatatatacncncnncccccatatatatatatatncccatggttttttttgctagacacagggactcgctgtgttgcccaagctgttcttgaactgggctcaagtgatcctcccgcctcagcctcccaaagtgctaagattataggattactggcatgaaccaccgcacccagccatatatatatatatataatttaacattttttcttttaatcccatccactattacagaacctatgaaattttcttcaacacctctatgtagcatttagaatgtaagctcctgatccaccagaatctgcaagaatggagtcaggagcctcagaaaaggagccacggccacaggcgagcagctcggggacaacgctggctccacagggcagctcctgggccaggaaaccccgctggtgaactaacacggaagcttgtcttgtggaaacaaacgcgctttcacaaacacagcagtcctgcgacatgaggcgggatgaaactttgaaaggtattttaaagtctagccttgtaacaaaacctcaggacactctgtccccagccttcgtgccccacggggagcttctagaggctgaaggtgacaagtgtgagcctctgctgtgccaccacccaccctgttacatgacagtggcaagctgagctttcacgggatggctggtgtttcacagaccgcccctccatcccgtagcctagttggctggcatggaggtggcgctgctgagcgtcagcctttggaatcactgatcacctcggcgtctgttttgtatgctctttacctatggactagtttgtggacggctaagaaatacagcctcagcattgatttgaaaaaaaaaaaaaaaaaaaatcttgattctgc

SEQ ID NO: 7374 - DNA, 3996 bp, Homo sapiens
agcggaggtgtctgccctgccctgccgtaggagatgggctgggagcctcccacgctctctctagcatgcgcacagcgggcgcagcaacacgctggcaggttaagcctctgggggtggatcctgaaaggtggtccagccgcctggccctgcgtgggaccctccacctggcagcaggtacccaaacaagggctggacagcagggtctcgctctgtcacacaggctggagtgcagtggtgtgatcttggctcatcgtaacctccacctcccgggttcaagtgattctcatgcctcagcctcccgagtagctgggattacaggtggtgacttccaagagtgactccgtcggaggaaaatgactccccagtcgctgctgcagacgacactgttcctgctgagtctgctcttcctggtccaaggtgcccacggcaggggccacagggaagactttcgcttctgcagccagcggaaccagacacacaggagcagcctccactacaaacccacaccagacctgcgcatctccatcgagaactccgaagaggccctcacagtccatgcccctttccctgcagcccaccctgcttcccgatccttccctgaccccaggggcctctaccacttctgcctctactggaaccgacatgctgggagattacatcttctctatggcaagcgtgacttcttgctgagtgacaaagcctctagcctcctctgcttccagcaccaggaggagagcctggctcagggccccccgctgttagccacttctgtcacctcctggtggagccctcagaacatcagcctgcccagtgccgccagcttcaccttctccttccacagtcctccccacacggccgctcacaatgcctcggtggacatgtgcgagctcaaaagggacctccagctgctcagccagttcctgaaagcatccccagaaggcctcaaggccctcgggctgcccccggccagccgagcagtttgccagaagcctgggagtcgaaactgacctctgtgagattcatgggggacatggtgtccttcgaggaggaggacggaatcaaaccccccacgggggccacagccggcctccaggcccaccaaccgggccctccagggaactgcagatcgagatttttgacgtggtcgtaagtgctgctgcctcgaacactcttccagaggacgaaaggccggaggggggaggctgagaagagactcctcctggtggacttcagcagccaagccctgttccaggacaagaattccagccacgtcctgggtgagaaggtcttggggattgtggtacagaacaccaaagtagccaacctcacggagcccgtggtgctcaccttccagcaccagctacagccgaagaatgtgactctgcaatgtgtgttctgggttgaagaccccacattgagcagcccggggcattggagcagtgctgggtgtgagaccgtcaggagagaaacccaaacatcctgcttctgcaaccacttgacctactttgcagtgctgatggtctcctcggtggaggtggacgccgtgcacaagcactacctgagcctcctctcctacgtgggctgtgtcgtctctgccctggcctgccttgtcaccattgccgcctacctctgctccaggaggaaacctcgggactacaccatcaaggtgcacatgaacctgctgctggccgtcttcctgctggacacgagcttcctgctcagcgagccggtggccctgacaggctctgaggctggctgccgagccagtgccatcttcctgcacttctccctgctcacctgcctttcctggatgggcctcgaggggtacaacctctaccgactcgtggtggaggtctttggcacctatgtccctggctacctactcaagctgagcgccatgggctggggcttccccatctttctggtgacgctggtggccctggtggatgtggacaactatggccccatcatcttggctgtgcataggactccagagggcgtcatctacccttccatgtgctggatccgggactccctggtcagctacatcaccaacctgggcctcttcagcctggtgtttctgttcaacatggccatgctagccaccatggtggtgcagatcctgcggctgcgcccccacacccaaaagtggtcacatgtgctgacactgctgggcctcagcctggtccttggcctgccctgggccttgatcttcttctcctttgcttctggcaccttccagcttgtcgtcctctaccttttcagcatcatcacctccttccaaggcttcctcatcttcatctggtactggtccatgcggctgcaggcccggggtggcccctcccctctgaagagcaactcagacagcgccaggctccccatcagctcgggcagcacctcgtccagccgcatctaggcctccagcccacctgcccatgtgatgaagcagagatgcggcctcgtcgcacactgcctgtggcccccgagccaggcccagccccaggccagtcagccgcagactttggaaagcccaacgaccatggagagatgggccgttgccatggtggacggactcccgggctgggcttttgaattggccttggggactactcggctctcactcagctcccacgggactcagaagtgcgccgccatgctgcctagggtactgtccccacatctgtcccaacccagctggaggcctggtctctccttacaacccctgggcccagccctcattgctgggggccaggccttggatcttgagggtctggcacatccttaatcctgtgcccctgcctgggacagaaatgtggctccagttgctctgtctctcgtggtcaccctgagggcactctgcatcctctgtcattttaacctcaggtggcacccagggcgaatggggcccagggcagaccttcagggccagagccctggcggaggagaggccctttgccaggagcacagcagcagctcgcctacctctgagcccaggccccctccctccctcagccccccagtcctccctccatcttccctggggttctcctcctctcccagggcctccttgctccttcgttcacagctgggggtccccgattccaatgctgttttttggggagtggtttccaggagctgcctggtgtctgctgtaaatgtttgtctactgcacaagcctcggcctgcccctgagccaggctcggtaccgatgcgtgggctgggctaggtccctctgtccatctgggcctttgtatgagctgcattgcccttgctcaccctgaccaagcacacgcctcagaggggccctcagcctctcctgaagccctcttgtggcaagaactgtggaccatgccagtcccgtctggtttccatcccaccactccaaggactgagactgacctcctctggtgacactggcctagagcctgacactctcctaagaggttctctccaagcccccaaatagctccaggcgccctcggccgcccatcatggttaattctgtccaacaaacacacacgggtagattgctggcctgttgtaggtggtagggacacagatgaccgacctggtcactcctcctgccaacattcagtctggtatgtgaggcgtgcgtgaagcaagaactcctggagctacagggacagggagccatcattcctgcctgggaatcctggaagacttcctgcaggagtcagcgttcaatcttgaccttgaagatgggaaggatgttctttttacgtaccaattcttttgtcttttgatattaaaaagaagtacatgttcattgtagagaatttggaaactgtagaagagaatcaagaagaaaaataaaaatcagctgttgtaatcacctagcaaaaaaaaaaaaaaaaaaaaaagagtcatttccttctgagctttttcctgtgcttctattgaaagagtcactgatactgatacaaataccttggggccaatcaggaaacatgaaagagagaagagggctgtgtgtga

SEQ ID NO: 7375 - DNA, 795 bp, Homo sapiens
ttttttttttttttttctcatttaactttttttctttcctctcctccttccctccgttcttcttttccttctttttctctttctccctctctccttacttttttctctttctctccttttaatttgctctattctctatatgggtctcgttccttctactgcaaataaggaaaatgaccacctggaaacccaaaaggcccaccacatcccagcagagccaccccagctgaaagaaacccagcttctctctccagcttctacacatcaatccaggccagaactccatctgacccttgtgagacatgcttccacacctcagtggaccactgaggctcgggaattcagcataatgatgggcacttctggggtcatgggccttccctgtagctaaggtgacaaaaggacagactggtctggaatgtccatgccagctggcttacatgcccagccattgatgctggctgctttctgggagctcagttgtgctctagaccagaaaacctccatgtggcctctccacatgaccctcatttctcagcatggtggctgcggcccaacggggagactctcatgagcaaagtttccaaaagaccaaagtggcagctgcgagcctcctcatggctgagcctcagcccccatgcagcatcagagccactgcagtcttggcttcccaggaggccagcccagaagcagcaagaaaggggacctggaaaccaggaggtttggttcgagggaaggccctctgatataatttggatatttatctccacccagatttcaagttaaattgcagtc

SEQ ID NO: 7376 - DNA, 2254 bp, Homo sapiens
gttctgtttagcatgtatgagggtgaacttagcttgctactcacacactactcaccctgtggaggaagttcgcctcgcttttgtggtgagtcttgctgtaatgatagcttatatttacaaataccgtcggcagtgcagggtcttcaggcttgcagaaaacggtcaagtcattactttgagaaatgtacaaacatctatgcttaatgaggtgctaaaagacaaaactcatctacaacctccttccccccaaactgccaacactctggattaacttaaaagctgctctctgggcaggttgcatcccagggctcctccttcacacgtggtggggccccaccttcgctttacctctagcgtcccagccctcgtggtcatctggaaccagggttggtacacagggcctgctggcattcctgtgatactccgtgatattctggaggaatccatcccttccctggggctccatcccactgccccagcaccgccagccaccctgattcagggacatcgcagagattggtgtttgacgctacggcagcagaggcgcagactcttgagtgttggagggtgtctggagggcctggggacaagcaccgcctgcactcccgggagctcggccccgccccaccatggctcttggtgcaggtgcactggaaggaactgggtggggcccttgtgccgaagggcggagatggcgccggcctgcctcacgggcaggggtccgtgtggcacctgtggccggcagcgggtgggtccaggagccgccatcatttggagcgggtatcgtcctcactgactctctgtgggtgcgggtggggtgtgtgacgggagctccgggcctggctgacagtgtctctcctctgcagcgggctgacgcacgaggcacacaggaaggaggtggagcaggtgtatctgcgctgtgcggcgggtgccgtggagtggatgtacccaacaggtgctctcatcgttaacctgcggcccaacaccttctcgcctgcccggcacctgaccgtgtgcatcaggtccttcacggactcctcgggggccaatatttatttggaaaaaactggagaactgagactgctggtaccggacggggacggcaggcccggccgggtgcagtgttttggcctggagcagggcggcctgttcgtggaggccacgccgcagcaggatatcggccggaggaccacaggcttccagtacgagctggttaggaggcacagggcgtcggacctgcacgagctgtctgcgccgtgccgtccctgcagtgacaccgaggtgctcctagccgtctgcaccagcgacttcgccgttcgaggctccatccagcaagttacccacgagcctgagcggcaggactcagccatccacctgcgcgtgagcagactctatcggcagaaaagcagggtcttcgagccggtgcccgagggtgacggccactggcaggggcgcgtcaggacgctgctggagtgtggcgtgcggccggggcatggcgacttcctcttcactggccacatgcacttcggggaggcgcggctcggctgtgccccacgcttcaaggacttccagaggatgtacagggatgcccaggagagggggctgaacccttgtgaggttggcacggactgactccgtgggccgctgcccttcctctcctgatgagtcacaggctgcggtgggcgctgcggtcctggtggggccgtgcggtgagggccgcgcgctgggagccgcatgccctgggcccaggcctgaccctggtaccgaagctgtggacgttctcgccacactcaaccccatgagcttccagccaaggatgccctggccgattggaaatgctgtaaaatgcaaactaagttattatatttttttttggtaaaaaagaaatgtccataggaaacaaattcccgtgtcttaaaacgccttggtgtgccgtctgatactgttctctaaagacgttaggagtcacggcatctggcctgcggttgggtgaagcactggccgttgggcacagtggatgtgtgaaaaggtgccattcagagttgttattctcatgacggaagttttggagccaaataatacgttttttattttcattttatttttaaaggatgagctttggtccttttcaggccgccggttgtttccgttcccgagaataaagacgaggatccgaaaaaaaaaaaaaaaaaaaaaaaaaaaaaaaaaaaaaaaaaaaaaaaaaaaaaaaaaaaaaaaaaaaaaaaaaagggac

SEQ ID NO: 7377 - DNA, 2147 bp, Homo sapiens
  misc_feature (592)..(644): n is a, c, g, or t
cccagcaggcgactagtgctcagccccgcccggcgggggcggggtctgcggcgtccgtgggcgccccccagtggcggcgggtggcgccgcacggagttcgccgcttgcaccgggaccgatgccatctgagacgcacgcgatgctggcgacgctggcgagggtggcagctctgcgcagaacctgcctcttctccggccggggcggcgggagggggctgtggactggccgcccgcagtcagatatgaacaatataaagccattggaaggggtaaaaattctggatctaacaagagtcctggcgggaccttttgctactatgaatttaggagatcttggagcagaagttataaaagtggagagaccaggagctggtgatgatacacgaacttgggggccaccttttgttgggacagaaagtacatattatctcagtgttaaccgaaataaaaaaagtattgctgttaatatcaaggatccaaaaggggtgaaaatcatctattgttccatcacagggtatggtcagacaggtccaatttctcagcgagctggttatgatgctgttgcctcggctgtttctggtctgatgcacatnnnnnnnnnnnnnnnnnnnnnnnnnnnnnnnnnnnnnnnnnnnnnnnnnnnnnttgccactggcctgtatgcatatggagctattatggctggattgatacaaaaatacaaaactgggaaaggactgttcattgattgtaacctgctgtcatcccaggtggcgtgtttgtctcacatagctgcaaattatcttattggtcaaaaggaagcaaaacgttggggtacagctcatggcagtatcgttccttaccaggcttttaaaaccaaggatggctatattgtagttggagcaggaaataaccagcagtttgccaccgtctgcaagatcttggatttgcctgagttgattgataattccaagtataaaactaaccaccttcgggtacacaatagaaaagagcttattaaaatattatctgaacggtttgaagaagaactgaccagcaagtggttatatctttttgaaggcagtggagtcccgtatggcccaatcaacaacatgaagaatgtatttgcagaacctcagaacgctgtctctggcttccaaagcctgctgcattccttggcccatggccccttccttcatcttcaaggatcagcaagggtattacacaatggcctcgttatggagatggagcatccaactgtggggaagatttccgtcccaggcccagctgtgagatacagtaagttcaagatgtcagaggccaggccgccccccctgctcgggcagcacacaacgcacatcctgaaggaggtcctgagatacgatgacagggccatcggggagctgctcagcgctggagtggtggaccaacatgaaactcactgacaaaggaaaagggctcttcctcataacctcgatccgaatacactggcaaaggcaacactttgcttggacccttctccccagttctgataccactaagaagaagatttagagtaactccagatttcttacatggcatctccagaatggctctggtattaatgaatctagtgccttttaaatgtatcccacgttttgttccctaccatcttttttttcagatgatgatttcattatggatttgtgggatttttaaaaataaagatttaatttttttcctggaaaaaaaaaaaaagaggaacgacgcagcctccccgccacgaccacaaacccctccccttaacccacgccccaccccccccgcatcacgctaaacagacacccccaaccaccccccgcaccccacccccaccctcccgccaccgcaccccaccccccccaccccacacgcgcgccccaaccgaacaccacccacccccgacacaccgacaggcacccagaccgtccctgccccacggtccccccctatccccccccccccccccccgccgccaccctccccgcgccccgcccaccccccaccgcaccccgcccccagcgccccacacccccaatccccccccacccaacgtgtagacctccccaaatccaagcccctcacgccacgccggcgccagcccctccgcccccccgccaccacccccacacaccaccaacaacacccact

SEQ ID NO: 7378 - DNA, 460 bp, Homo sapiens
cgagccccaagaattcggaacgggggtgaaatcactaagactcttgttccagggaagagaagaaacaaaaaactgaaggaataaaaagtttaagccacaaagcattaataggaacacttggacctgtacaagagatatgctgaggggcatggggaaggaattccttccttctcaagctgtaggtgtcaggctttggccgtgaaaatgacagtggattttctactccttcagcaaactttctggaaaccccatcacctgccacgtgtgtgtggaggtgctgtgtgggtatacaaaggcgaattaagatgtgatcctgggtcagggacagtggctgccacctgtaatcccagcactttggaagaccaaggtggaaggctcacttgagcccagaagtttgagaccaacctgagaaacagagtgagatccccatctttacaaaaaaaaaaaaaaaaaaagatgc

SEQ ID NO: 7379 - DNA, 4267 bp, Homo sapiens
ggagtcgctgtttgggacgctgggtgtgcggtgttctgtctccgctcccgtttcgctgtcacagcccgttccttcccggagcccgggacaggctgggcgcgcgcccgtgacgcgtgaccaaaaccaaagacggccatgaagtgagatcgtgcaaagtagcagataaaacgggcagcatcactatttccgtgtgggatgagatcggaggtcttatacagccaggggatattattcggttgaccagagggtatgcatccatgtggaaaggatgtctgacactttatactggaaggggtggtgaacttcaaaaaattggggaattttgtatggtttattcagaagtgccaaatttcagtgaacccaacccagattatcgaggacagcagaacaaaggggcacagagtgaacagaagaataattccatgaatagtaatatgggtacaggtacatttggaccagtgggaaatggtgttcacactggccctgaatcaagggaacaccagttttcacatgctggcagaagcaatggccggggacttataaatccacaactacaaggaacagctagtaatcaaacagtgatgaccacaataagtaatggcagggaccctcggagagcctttaaaagatgacctatgctaaatactcatgtgtagtttttatactacatgccctacttgaacacttattgcacttttatttattgttaactgtgaaaagtacgtcctttattgggtttccttttatattcttggtttgttaagaagaatggtttgtttttatagcaaaactgttaagctgctcgagtctcctgttgaagaatgggaacactgaaaagtaggggcatttatttttagagtaaaaagattattggatagcctttaaaaaacctgcacccatttcatgggtgagttacttaagacatcagctttatagcctctatgagtctatcttctgtataagttttgtaatatttaacataaggcttaatgggagatgttcttttgtcttgtattcagatattgccaactaaagcaataaccatcaaaaaacacaagaacttgtcaatgctagcagtaatttttgagtgtttgtggctctcggaatgattgacttcgttcagtgactactattaagattttccaaggactgactcatcccaaatttttgttgtattaccaaaaaaacagattccttatcagaatttggaatagaatgtgatctctattgcaacaagtaattttaaaagaaagctacatttattttagagtagtgctcctaacatgtattatcaactttgtggattacattggaggaaaatttaaaactggggccttgaatatttattttttgaaactaccatgttaaatactgaagtataatttgggggagttataaagttatgataaacattcatctgattattttaaacaatagttgtggtagataaacatactggaggtgagtcaaattgaattcatatagtaacatgcagtctgaagtcctagttacttaataggtactcagcctggagtgaaaatcctgggtactgactttgagaggagtgagtgtgcatgttgtcaaagtttctgaacacagttcacatagccttattagcaaaagttttaagaaatggctctatcaaagaagcaattgcagctttattcagaaatataaaagtggaatttatgtacatgtcataagtggtacccacttcccctttttactgtagggtggataactcttaggatttaactctttgaatattatctcttgaataaagcatgtgttaatgttaacaaacctaaataaaattagccctttcaatgacttacagtggagagccagtacatcttaactactgttgtagtgatggtatcaacctcatggttacttagctctgcatttgttgctttgttttttttccacttcaaatcacaaaataagtagattttgttttctgaaaactccatagcatttgaatacaaaaagttgtgccagattgtttgccctaattcactgtgtttaacaaatatttcagtacacactatgtattaggcactgtgtggaaagtgttaaggggtagacaaaataccgaataatctccacaagtttatttgtggtctatagtacttttgtaactggggttacaaaaattatagaaatttttttcctttgttcatatgcatattcatgattataatttggctttgtttgtgattaatgttttcttaagattttcacattatagaatacctcaaaagaagttgtctaaggactgggatagagagtatgtttcataaaattgtagatgtttagaatttttaaaaaccctacaaattagtatatgattgttttatataagtaagataggagcaacactttaaattatttgtgggagaatacagcattaaaggtgattttaaaagaaaaaaatttggaattttagaaaatttaaatgctgtcaggtatggaatgctgggcttccaatcctggcctcattgtctcctcacctgtgatgttggatgagttattacacttgaaatgtctttaagccttaggttccacaagtatgaaaacaagtaagtaacagtatcctttctagacttgtttaagatttccatgtaagtaattataatgacttctgacacataataatgtcgtcttataccccaacagtaggaaaaaaatgcagaattcagtatgaaagtattgttaccctttaacacagtggtccccaacctttttggcaccagagaccagtctcctggaagacagtttttccgtgggatcgggggatggttttgggatgaaactgttccacctcaggtcatcagtcattagttagattctcataaggagcgtgcaacctcaatcccttgcatactcatttcacaatagggttcatgctcctatgagaatctaatgccaccactcatctgacaggaggtggagctcaggcagtaagtctccctcgcccgccactcacctgctgggcgttcctgttcctagcaggccagaattgatactgatctaggggttggggacccctgcttaacatgttgagattaaatggagaaagacttaagcttttacttttgtgattgacacttgcttcaataatgtaaccttgttctgtgtttttatcatttattaacaaatttcttttttcttaagggaagcctccaaaatcaaagaaaagtgagttacaatccataatgaatatttgccttaccagcctactggaacacattcatcaagaacttaagaggaagaaagttttctgccttcctccttcctagtgctctcagctatcaactttgaaataagtttaaacaacacctactgaaaacaaaaaccacttagtataaaaatatcccccaccacaaaaaaaaaaaaaaaaaaaaaaaaaaaaaacagttctggagtggatcaaagtctcatcagatcagcttgccccttcttgtttgggcaggttctaggagaagctgctgtaatacaaaaactgaaagatgaaatcgtaaagctagataatgataatgatatttagtggggaaggctacagtatggttttcccataggcatttaaacactcactttttccaacgctttatactttgtccctatagcctttgtaattttaactttgatgacagtttaacttaggataacctgaatatgggtattactgttagtcatttgtatttttatcatttaacattttaaatgaatgtttaatttgctgggttgagtaatgccaagggaatgatgctaaaaacaaatagatgtgaggttagtaaaagattaaagttacaatttatgatacgagaacttcttactataggaaagtaggtaaatgaccctaaaaggttttctcagaaggtaaaagttttacatcagtctgaagacatataactctaacatttcagtttagttactgaaatgactttttctggtgtcattgagatactaggctgtttgttccaagccattttaggctgagaatgactcttaaggtcttctaatgcatttcagagggttctagaaacaacaaactgaacatgatatgaaactaacaacatagaatgcccccgcatatactctggctacagctccttatcattgaaacaatacaatgtttgtcttttggcacaagcaaacagaagaccagcatgaactcgaacaacacaaaccaacacacacgcgcgtaaaacaagaaactagggggcgggagagcaggcagggagaaggggaggttgtcaagacg

SEQ ID NO: 7380 - DNA, 1056 bp, Homo sapiens
  misc_feature (914)..(928): n is a, c, g, or t
tttttttttttttttatagacatctttttaatgttttactttaaaacaaataatcccagtaaaagagagcaaaggaaattacactttaatgatagcttgaaatggatatggtgttcccgatttatttgttttcaggaaacagacaattgcattgtcatacatgacttagaactgcttacttaaatgcacattattagattagattaagtttctcttacaaaaacacaaccatgtcatttaaggcgaaaaatctcagcttctagggagacaagttaatatttatgatatttcctctatctgatttagtgaaatgatccattaatttagttagccaggtttcatcatccttacagttttgctttgcaaatggcatgagaattggtcaatttgtgcctgatttcctcctctctagtagacttattttacttgcaaattaagaacttcagaatcactgaatcaatgggaggtgagaaaggcaccttagaacagatcaggacttaaaaactcaataaagttattttaaacaaaacttgcaatctacaaatattaatttagttgaacaaaatgcaaacatgtagatcagacatagcaaaatttttttagttaacctcatacaagggatatttgcaattaagtattagcttgatcaaccctacatgttgaagaaggcagacacacttgtactcagaaagcatatggctactcagtgctcagctaaattgtgcttcaagacatcattaaaattgaccaatggaaatttgcttagtgtaaatgggagacccctctcatttccacagagagtaacacgacagacagaaccttatagcttccacacaactatcttttaacatcccccaatttttgtgctagagtaagatagacacaaaatggtcatggcttcaatgtataaaagnnnnnnnnnnnnnnntttatcacattttgctatgattaagacctcagtgctgtgtgtaggttttgtttctgaatcttcagtcgtcagcaatgctgggtgagctgtactgtgtttgagacttaacgaggcctaaggagggtccc

SEQ ID NO: 7381 - DNA, 7617 bp, Homo sapiens
  misc_feature (1872)..(1917): n is a, c, g, or t
  misc_feature (2525)..(2547): n is a, c, g, or t
ttttcttgcttttcttcccttttttttctttttgcaaacaaaacaaaaaacagcatagaagaaagagcaaaataaagaagaagaagaggaggaagagagggaaagagaggaagggaaaaaaaacaccaacccgggcagaggaggaggtgcggcggcggcggcggcggcggcagcggcggcagcggcgcggcggcggctcggaccccctcccccggctccccccatcagtgcagctctccgggcgatgccagaatagatgccggggcaatgtcccgccgcaaacagggcaacccgcagcacttgtcccagagggagctcatcaccccagaggctgaccatgtggaggccgccatcctcgaagaagacgagggtctggagatagaggagccaagtggcctggggctgatggtgggtggccccgaccctgacctgctcacctgtggccagtgtcaaatgaacttccccttgggggacatcctggtttttatagagcacaaaaggaagcagtgtggcggcagcttgggtgcctgctatgacaaggccctggacaaggacagcccgccaccctcctcacgctccgagctcaggaaagtgtccgagccggtggagatcgggatccaagtcacccccgacgaagatgaccacctgctctcacccacgaaaggcatctgtcccaagcaggagaacattgcaggtaaagatgagccttccagctacatttgcacaacatgcaagcagcccttcaacagcgcgtggttcctgctgcagcacgcgcagaacacgcacggcttccgcatctacctggagcccgggccggccagcagctcgctcacgccgcggctcaccatcccgccgccgctcgggccggaggccgtggcgcagtccccgctcatgaatttcctgggcgacagcaaccccttcaacctgctgcgcatgacgggccccatcctgcgggaccacccgggcttcggcgagggccgcctgccgggcacgccgcctctcttcagtcccccgccgcgccaccacctggacccgcaccgcctcagtgccgaggagatggggctcgtcgcccagcaccccagtgccttcgaccgagtcatgcgcctgaaccccatggccatcgactcgcccgccatggacttctcgcggcggctccgcgagctggcgggcaacagctccacgccgccgcccgtgtccccgggccgcggcaaccctatgcaccggctcctgaaccccttccagcccagccccaagtccccgttcctgagcacgccgccgctgccgcccatgccccctggcggcacgccgcccccgcagccgccagccaagagcaagtcgtgcgagttctgcggcaagaccttcaagttccagagcaatctcatcgtgcaccggcgcagtcacacgggcgagaagccctacaagtgccagctgtgcgaccacgcgtgctcgcaggccagcaagctcaagcgccacatgaagacgcacatgcacaaggccggctcgctggccggccgctccgacgacgggctctcggccgccagctcccccgagcccggcaccagcgagctggcgggcgagggcctcaaggcggccgacggtgacttccgccaccacgagagcgacccgtcgctgggccacgagccggaggaggaggacgaggaggaggaggaggaggaggaggagctgctactggagaacgagagccggcccgagtcgagcttcagcatggactcggagctgagccgcaaccgcgagaacggcggtggtggggtgcccggggtcccgggcgcggggggcggcgcggccaaggcgctggctgacgagaaggcgctggtgctgggcaaggtcatggagaacgtgggcctaggcgcnnnnnnnnnnnnnnnnnnnnnnnnnnnnnnnnnnnnnnnnnnnnnngccttcctgaagcgtgcggcgggcggcggggacgcgggcgacgacgacgacgcgggcggctgcggggacgcgggcgcgggcggcgcggtcaacgggcgcgggggcggcttcgcgccaggcaccgagcccttccccgggctcttcccgcgcaagcccgcgccgctgcccagccccgggctcaacagcgccgccaagcgcatcaaggtggagaaggacctggagctgccgcccgccgcgctcatcccgtccgagaacgtgtactcgcagtggctggtgggctacgcggcgtcgcggcacttcatgaaggaccccttcctgggcttcacggacgcacgacagtcgcccttcgccacgtcgtccgagcactcgtccgagaacggcagcctgcgcttctccacgccgcccggggacctgctggacggcggcctctcgggccgcagcggcacggccagcggaggcagcaccccgcacctgggcggcccgggccccgggcggcccagctccaaggagggccgccgcagcgacacgtgcgagtactgcggcaaggtgttcaagaactgcagcaacttgacggtgcaccggcggagccacaccggcgagcggccttnnnnnnnnnnnnnnnnnnnnnnncgcgtgcgcgcagagcagcaagctcacgcgccacatgaagacgcacgggcagatcggcaaggaggtgtaccgctgcgacatctgccagatgcccttcagcgtctacagcaccctggagaaacacatgaaaaagtggcacggcgagcacttgctgactaacgacgtcaaaatcgagcaggccgagaggagctaagcgcgcgggccccggcgccccgcacctgtacagtggaaccgttgccaaccgagagaatgctgacctgacttgcctccgtgtcaccgccaccccgcaccccgcgtgtccccggggcccaggggaggcggcactccaacctaacctgtgtctgcgaagtcctatggaaacccgagggttgattaaggcagtacaaattgtggagccttttaactgtgcaataatttctgtatttattgggttttgtaatttttttggcatgtgcaggtactttttattattattttttctgtttgaattcctttaagagattttgttgggtatccatcccttctttgttttttttttaacccggtagtagcctgagcaatgactcgcaagcaatgttagaggggaagcatatcttttaaattataatttggggggaggggtggtgctgcttttttgaaatttaagctaagcatgtgtaatttcttgtgaagaagccaacactcaaatgacttttaaagttgtttactttttcattccttccttttttttgtcctgaaataaaaagtggcatgcagttttttttttaattattttttaattttttttttggtttttgtttttggggtggggggtgtggatgtacagcggataacaatctttcaagtcgtagcactttgtttcagaactggaatggagatgtagcactcatgtcgtcccgagtcaagcggccttttctgtgttgatttcggctttcatattacataagggaaaccttgagtggtggtgctgggggaggcaccccacagactcagcgccgccagagatagggtttttggagggctcctctgggaaatggcccgacagcattctgaggttgtgcatgaccagcagatactatcctgttggtgtgccctggggtgccatggctgctattcgctgtagattaggctacataaaatgggctgagggtacctttttggggagatggggtggcctgcagtgacacagaaaggaagaaactagcggtgttcttttaggcgttttctggcttgacggcttctctctttttttaaatcacccccaccacataaatctcaaatcctatgttgctacaaggggtcatccatcatttcccaagcagacgaatgccctaattaattgaagttagtgttctctcatttaatgcacactgatgatattgtagggatgggtggggtggggatcttgcaaatttctattctcttttactgaaaaagcaggggatgagttccatcagaaggtgcccagcgctacttcccaggtttttattttttttttcctatctcattaggttggaaggtactaaatattgaactgttaagattagacatttgaattctgttgacccgcactttaaagcttttgtttgcatttaaattaaatggcttctaaacaagaaattgcagcatattcttctctttggcccagaggtgggttaaactgtaagggacagctgagattgagtgtcagtattgctaagcgtggcattcacaatactggcactataaagaacaaaataaaataataatttataggacagtttttctactgccattcaatttgatgtgagtgccttgaaaactgatcttcctatttgagtctcttgagacaaatgcaaaactttttttttgaaatgaaaagactttttaaaaaagtaaaacaagaaaagtacattctttagaaactaacaaagccacatttactttaagtaaaaaaaaaaaaaattctggttgaagatagaggatatgaaatgccataagacccaatcaaatgaagaaataaacccagcacaaccttggacatccattagctgaattatcctcagccccttttgtttttgggacaacgctgcttagatatggagtggaggtgatttactgctgaattaaaactcaagtgacacaagttacaagttgatatcgttgaatgaaaagcaaaacaaaaacaattcaggaacaacggctaattttttctaaagttaaatttagtgcactctgtcttaaaaatacgtttacagtattgggtacatacaagggtaaaaaaaaaattgtgtgtatgtgtgttggagcgatctttttttttcaaagtttgcttaataggttatacaaaaatgccacagtggccgcgtgtatattgttttcttttggtgacggggttttagtatatattatatatattaaaatttcttgattactgtaaaagtggaccagtatttgtaataatcgagaatgcctgggcattttacaaaacaagaaaaaaaatacccttttcttttccttgaaaatgttgcagtaaaatttaaatggtgggtctataaatttgttcttgttacagtaactgtaaagtcggagttttagtaaatttttttctgccttgggtgttgaatttttatttcaaaaaaaatgtatagaaacttgtatttggggattcaaaggggattgctacaccatgtagaaaaagtatgtagaaaaaaagtgcttaatattgttattgctttgcagaaaaaaaaaaaatcacatttctgacctgtacttatttttctcttcccgcctccctctggaatggatatattggttggttcatatgatgtaggcacttgctgtatttttactggagctcgtaattttttaactgtaagcttgtccttttaaagggatttaatgtacctttttgttagtgaatttggaaataaaaagaaaaaaaaaacaaaaacaaacaggctgccataatatatttttttaatttggcaggataaaatattgcaaaaaaaacacatttgtatgttaagtcctattgtacaggagaaaaagggttgtttgacaacctttgagaaaaagaaacaaaaggaagtagttaaatgctttggttcacaaatcatttagttgtatatattttttgtcggaattggcctacacagagaaccgttcgtgttgggcttctctctgaacgccccgaaccttgcatcaaggctccttggtgtggccacagcagaccagatgggaaattatttgtgttgagtggaaaaaaatcagtttttgtaaagatgtcagtaacattccacatcgtcctccctttctctaagaggccatctctaagatgtcagatgtagaggagagagagcgagagaacatcttccttctctaccatcactcctgtggcggtcaccaccaccacctctcccgcccttaccagcagaaagcaatgcaaactgagctgctttagtccttgagaaattgtgaaacaaacacaaatatcataaaaggagctggtgattcagctgggtccaggtgaagtgacctgctgttgagaccggtacaaattggatttcaggaaggagactccatcacagccaggacctttcgtgccatggagagtgttggcctcttgtctttcttccctgctttgctgctttgctctctgaaacctacattccgtcagtttccgaatgcgagggcctgggatgaatttggtgcctttccatatctcgttctctctccttcccctgcgtttcctctccatccttcatcctccattggtcctttttttttctttcattttttatttaatttcttttcttcctgtctgttcctcccctaatcctctattttatttttattttttgtaaagccaagtagctttaagataaagtggtggtcttttggatgagggaataatgcatttttaaataaaataccaatatcaggaagccattttttatttcaggaaatgtaagaaaccattatttcaggttatgaaagtataaccaagcatccttttgggcaattccttaccaaatgcagaagcttttctgttcgatgcactctttcctccttgccacttacctttgcaaagttaaaaaaaaggggggagggaatgggagagaaagctgagatttcagtttcctactgcagtttcctacctgcagatccaggggctgctgttgcctttggatgccccactgaggtcctagagtgcctccagggtggtcttcctgtagtcataacagctagccagtgctcaccagcttaccagattgccaggactaagccatcccaaagcacaagcattgtgtgtctctgtgactgcagagaagagagaattttgcttctgttttgtgtttaaaaaaccaacacggaagcagatgatcccgagagagaggcctctagcatgggtgacccagccgacctcaggccggtttccgcactgccacaactttgttcaaagttgcccccaattggaacctgccacttggcattagagggtctttcatggggagagaaggagactgaattactctaagcaaaatgtgaaaagtaaggaaatcagcctttcatcccggtcctaagtaaccgtcagccgaaggtctcgtggaacacaggcaaacccgtgattttggtgctccttgtaactcagccctgcaaagcaaagtcccattgatttaagttgtttgcatttgtactggcaaggcaaaatatttttattaccttttctattacttattgtatgagcttttgttgtttacttggaggttttgtcttttactacaagtttggaactatttattattgcttggtatttgtgctctgtttaagaaacaggcacttttttttattatggataaaatgttgagatgacaggaggtcatttcaatatggcttagtaaaatatttattgttcctttattctctgtacaagattttgggcctctttttttccttaatgtcacaatgttgagttcagcatgtgtctgccatttcatttgtacgcttgttcaaaaccaagtttgttctggtttcaagttataaaaataaattggacatttaacttgatctccaaaaaaaaaaaaaaaa

SEQ ID NO: 7382 - DNA, 1197 bp, Homo sapiens
  misc_feature (214)..(214): n is a, c, g, or t
aggggctctttaaaggggggcccccggggtgctccttgaaggaaaaaaacttcccccctttttctgggggcttcatggcgcgctgttaatgttcccaagggcccccccaccgggtgcaccacataggaaggggtttccctcccaagggccccttgttttctgggcagtgggaacaagccagtttggaggagagaaaagaaagccttgcaagctntacattgtgatcccggggctttcccccatctggtgctttttccccatggagaaccaccacacccaggtaagtgaggttgccccacacagccgtctcccaggagaatcccttctgcaaaccaaacgttacttagactgcaagctagaaagccaccaaggccaggctttgttaaaagaagtgtattctatttatgttgttttaaaatgcatactgagagacaaacatcttgtcattttcactgtttgtaaaagataattcagattgtttgtctccttgtgaagaaccatcgaaacctgtttgttcccagcccacccccagtggatgggatgcataatgccagcaagttttgtttaacagcaaaaaaggaagattaatgcaggtgttatagaagccagaagagaaactgtgtcaccctaaagaagcatataatcatagcattaaaaatgcacacattactccaggtggaaggtggcaattgctttctgatatcagctcgtttgatttagtgcaaaaatgttttcaagactatttaatggatgtaaaaaagcctatttctacattataccaactgagaaaaaaatggtcggtaaagtgttctttcataataaataatcagacatggtcccatttgcaggaaaagtgcagactctgagtgttccagggaaacacatgctggacatcccttgtaacccggtatgggcgcccctgcattgctgggatgtttctgcccacggttttgtttgtgcaataacgttatcacatttctaatgaggattcacattaatataatataaaataaataggtcagttactggtctctttctccgaatgttatgttttgcttttatctcacagtaaaataaatataattaatggtttgcatgtgaaattcacttttgaaagaacatgttaccttaccttttgttttagaagttttcaagtattaaaatattttttagaaaaaaaaaaaaaaaaaaaaaaaa

SEQ ID NO: 7383 - DNA, 1606 bp, Homo sapiens
caccgcgtccgcccacgcgtccgcccggaatgaacggtccatcctccttgccgggatttccacaaaattcaaacactttaacacctcccggtgcaggcatgcttgggtttcctacttcagctacttcgtctcctgccctgtctctcagcagtgcccccaccaaacctttgctgcagactccaccacctccaccacctcctcctcctcctcctccttcatcctctctgtcaggacagcagaccgagcaacagaacaaagaatctgagaaaaagcaaactaagccaaacaaggtgaaaaaaaatcaccgaggaggaattagaggccaccaaacccgaaaaacaccccaaaaaagaggaaaaaatctcatctgctctttcagtggtgggcaaagttgtaggtgaaacacatgtcgatcctattcagttgcaggcattacagaatgcaattgctggtgacccagcttcctttataggcggacagttcttgccatactttatccctgggtttgcttcttattttacacctcagctccctggaacagtgcaggggggatacttcccacctgtctgtggcatggagagcctctttccttatggccctacaatgccccagacactggcaggtctgtccccaggtgcactgttgcagcagtaccaacagtatcagcagaacctgcaggagtccctgcaaaagcagcaaaagcaacagcaagaacagcagcagaaaccagttcaggcaaagacatccaaagtagaaagtgaccagccgcaaaactccaacgatgcttcagaaacaaaggaagacaaaagtactgctacagaaagcacaaaagaagaaccccagttagaatccaaaagtgcagacttttcagacacttacgttgttccattcgtcaagtatgagtttatatgcagaaagtgccagatgatgtttactgatgaagacgccgcagtaaatcatcaaaagtccttctgttatttcggtcagcctttgattgacccacaagagacagtgcttcgtgtcccagtcagcaaatatcagtgtcttgcctgtgatgtggctatcagtgggaatgaagcacttagccaacacctccagtcaagcttgcacaaagagaaaacaatcaaacaagcaatgagaaatgccaaagagcatgttagattattacctcactcagtctgctcccctaatcctaacaccacatctacctcgcagtctgcagcttcttctaataacacctatcctcatctttcttgcttctccatgaagtcctggcctaatatccttttccaagcgtctgccaggagagctgcttctcccccttcttctcctccttccctttccttgccttcaacggttacctcaagtttgtgcagcacctcaggggttcaaacctcactacccacagaaagttgttcagatgagtctgacagtgagctgagccagaagctagaagacttagataattctttggaagtgaaggctaagcctgcttctggcctagatggtaatttcaatagcatccgaatggatatgttcagtgtgtaggagtgaagacaggatcccgtgcttaaaaaaataaaaaataaaaaaaaaaaaaaaaaaa

SEQ ID NO: 7384 - DNA, 1153 bp, Homo sapiens
gccggcgctggggcacgagggagacggactcttgctatgttgcccaggctggtcttgaactcctggcctcaagcaatcctcctgcctcagcctcccaaagcacggggattacaaaccctgctgagggatgcccaagaagttccagggtgagaacaccaagtcggcagcggcccgggcacggagggcagaggccaaggcggccgctgatgccaagaagcagaaggagctggaggatgcctactggaaggacgacgacaaacacgtcatgaggaaggagcagcgcaaggaggagaaggagaagcggcgcctcgaccagctggaacgtaagaaggagacgcagcgcctactggaggaggaggactccaagctcaagggcggcaaggcgccgcgggtggccacgtccagcaaggtcacccgggcccagatcgaggacacgctgcgccgagaccatcagctcagggaggccccggacacagccgagaaagccaagagccatctggaggtgccgctggaggagaacgtgaaccgccgcgtgctggaggagggcagcgtggaggcgcgcaccatcgaggacgccattgcagtgctcagcgtggcggaggaggcggccgaccggcacccagaaagacgcatgcgggcagccttcacagcctttgaggaagcccagctgccgcggctcaaacaagagaaccccaacatgcggctgtcgcagctgaaacagctgctcaagaaggagtggctccgctctcctgacaaccccatgaaccagcgggccgtgcccttcaatgcccccaagtgagcccagaacttggggagccagttcacccacggtggtccaaggtcacgactctgcacgcccttaggccaggtcagctgcgagggtcacagagcgttccgggggccaaggcgccgggccccggggccatgctcttatcaccagccacccgtcctcccgccagagggtccctgccccgagtgacaccccatcccctcccatcccccggcgcgtgtgtgtagagcctcagggctgagtgcccaataaaggtggcggcaaggctaaaaaaaaaaaaaaaaaaaaaagctaagacagatgtaacaaaggagggaatcgttatcctcgggggtatataattccgggtggcgaaaaaaaaag

SEQ ID NO: 7385 - DNA, 1608 bp, Homo sapiens
  misc_feature (530)..(558): n is a, c, g, or t
  misc_feature (1601)..(1602): n is a, c, g, or t
attgcgtagttccgaataccctcggccacacctggccttctccatgctcggaataacttcctgcagcgaccaacaggctaaagagggggaagggatccagcaccggctcctcctccggcaaccacggtgggagcggcggaggaaatggacataaacccgggtgtgaaaagccagggaatgaagcccgcgggagcggggaatctgggattcagaactctgagacgtctcctgggatgtttaactttgacactttctggaagaattttaaatccaagctgggtttcatcaactgggatgccataaacaagaaccaggtcccgccccccagcacccgagccctcctctacttcagccgactctgggaggatttcaaacagaacactcctttcctcaactggaaagcaattattgagggtgcggacgcgtcatcactgcagaaacgtgcaggcagagccgatcaggtgagtctctgtcctcaagttaccctgcagggcccttggtcccccttggccttgctcccggatctgggnnnnnnnnnnnnnnnnnnnnnnnnnnnnnttcaatggctttctcagccgggtgcaggatggcaggaggtggcagctgtaacttccaaggtgagacatctaccatggacccgctgggttacgtcctggcacttcttttcttggtctcctaccctcacctcccaagtaacacttgaagagttggcagaggtcttgagggcaggaggaggagtaggaggaggaggcggcggccatttgggctaggacagtaaaggcaggtgagggtgggggccctggctggctggaggagattgtataaaagaaaacacgtgacacaaggaggggagaaggcaggtgttttaggaaaggtctggtccaggcaggaaggtgggatgtttattccagagcaaaatggccttcgtccgtctgttctaaccgccatgcccacttcttccacagaactacaattacaaccagcatgcgtatcccactgcctatggtgggaagtactcagtcaagacccctgcaaaggggggagtctcaccttcttcctcggcttcccgggtgcaacctggcctgctgcagtgggtgaagttttggtaggtgagtgtcagagtgagccgacccaggccacatcctggcagtggaggcacagtcacccggggcagggccaggatcttggtatatcctcagatctcagtgggcagcgacatgaagtcaggcggagcaaaagtgaggggcaccacaggcgaacaggcaatttcttgcaaccaccaccgaggccccgaaaagcactggtcgtcagggagctcctccccttggcccccagcctgtgccagccctggcccggctgccacacctctgtttcctaggctggggacccagcttgtctctccttgtttcttcccactgcactgtggtgcttcagtggccaccagcctcgtcacatacaccagcatctttctgtacctcctccctttggtgacctgaagtcactgtgacagttctccaggaaggaggagcttcctacttttgagtttctctgtggaaataaaacatgaatcttgtttccctaaaaaaaaaaaaaaaaaaggnnaagggc

SEQ ID NO: 7386 - DNA, 4425 bp, Homo sapiens
  misc_feature (178)..(236): n is a, c, g, or t
  misc_feature (1590)..(1608): n is a, c, g, or t
  misc_feature (3592)..(3592): n is a, c, g, or t
ggcgcccctcctgccgccccccgcccggcctcgcactccgcttccggccgctctcgctgcggccgcacccgcgcccgtgcccgccccgcgcctgccccgcgcctcatggagggcgcagggccccggggggccgggccggcgcggcgccggggagccggggggccgccgtcaccgctgnnnnnnnnnnnnnnnnnnnnnnnnnnnnnnnnnnnnnnnnnnnnnnnnnnnnnnnnnnnggaactgaaccctcgcggccgcaacgtgtgccgtgctcccggctcccaggtgcccacgtgctgcgctggctggaggcagcaaggggacgagtgtgggattgcggtgtgcgaaggcaactccacgtgctcagagaacgaggtgtgcgtgaggcctggcgagtgccgctgccgccacggctacttcggtgccaactgcgacaccaagtgcccgcgccagttctggggccccgactgcaaggagctgtgtagctgccacccacacgggcagtgcgaggacgtgacaggccagtgtacttgtcacgcgcggcgctggggcgcgcgctgcgagcatgcgtgccagtgccagcacggcacgtgccacccgcggagcggcgcgtgccgctgtgagcccggctggtggggcgcgcagtgcgccagcgcgtgctactgcagcgccacgtcgcgctgcgacccacagaccggcgcctgcctgtgccacgcaggctggtggggccgcagctgcaacaaccagtgcgcctgcaactcgtctccctgcgagcagcagagcggccgctgtcagtgccgcgagcgtacgttcggcgcgcgctgcgatcgctactgccagtgcttccgcggccgctgccaccctgtggacggcacgtgtgcctgcgagccgggctaccgcggcaagtactgtcgcgagccgtgccccgccggcttctacggcttgggctgtcgccgccggtgtggccagtgcaagggccagcagccgtgcacggtggccgagggccgctgcttgacgtgcgagcccggctggaacggaaccaagtgcgaccagccttgcgccaccggtttctatggcgagggctgcagccaccgctgtccgccatgccgcgacgggcatgcctgtaaccatgtcaccggcaagtgtacgcgctgcaacgcgggctggatcggcgaccggtgcgagaccaagtgtagcaatggcacttacggcgaggactgcgccttcgtgtgcgccgactgcggcagcggacactgcgacttccagtcggggcgctgcctgtgcagccctggcgtccacgggccccactgtaacgtgacgtgcccgcccggactccacggcgcggactgtgctcaggcctgcagctgccacgaggacacgtgcgacccggtcactggtgcctgccacctagaaaccaaccagcgcaagggcgtgatgggcgcgggcgcgctgctcgtcctgctcgtctgcctgctgctctcgctgctcggctgctgctgcgcttgccgcggcaaggaccctacgcgccgaccccgcccccgcagggagctttcgcttgggaggaagaaggcgccgcaccgactatgcggnnnnnnnnnnnnnnnnnnnatgaagctgccccggatcccgctccggaggcagaaactacccaaagtcgtagtggcccaccacgacctggataacacactcaactgcagcttcctggagccaccctcagggctggagcagccctcaccatcctggtcctctcgggcctccttctcctcgtttgacaccactgatgaaggccctgtgtactgtgtaccccatgaggaggcaccagcggagagccgggaccccgaagtccccactgtccctgccgaggcgccggcgccgtcccctgtgcccttgaccacgccagcctccgccgaggaggcgatacccctccccgcgtcctccgacagcgagcggtcggcgtccagcgtggaggggcccggaggggctctgtacgcgcgcgtggcccgacgcgaggcccggccggcccgggcccggggcgagattgggggcctgtcgctgtcgccatcgcccgagcgcaggaaaccgccgccacctgaccccgccaccaagcctaaggtgtcctggatccacggcaagcacagcgccgctgcagctggccgtgcgccctcaccaccgccgccaggctccgaggccgcgcccagccccagcaagaggaaacggacgcccagcgacaaatcggcgcatacggtcgaacacggcagcccccggacccgcgacccaacgccgcggccccccgggctgcccgaggaggcgacagccctcgctgcgccctcgccgcccagggcccgagcgcggggccgcggccccggcctcttggagcccacggacgccggcggtcccccgcgaagcgcgcccgaggctgcctccatgttggccgctgagctgcgcggcaagactcgcagcctgggccgcgccgaggtggccctgggcgcgcagggccccagggaaaagccggcgcccccacagaaagccaagcgctccgtgccgccagcctcgcccgcccgcgcgcccccagcgaccgaaaccccggggcctgagaaggcggcgaccgacttgcccgcgcctgagaccccccggaagaagacccccatccagaagccgccgcgcaagaagagccgggaggcggcgggcgagctgggcagggcgggcgcacccaccctgtagcaggctgtggctcgtccgcgcgcagctccctcagcttcgcagcgccgcccgccaccccacacctcccacgctaccgggcacgggcggcctcctattggccgggcaccgcgcggctagcggaggttgcgtctcattggctcaggtcctgcagccgctcctggattggagcagtgtgctctggcgggaagggcccatcccgttggtcgaggcctgacaggcgcttagcgggcgactccctccccattggccgagttatggagcgctccgaccagacagcgtctcattggccaaagatgggagggttccgcttaaagaccgcctcttactggccaggagtggacttggttagggctaccttctcattggttgcagccagaggcacttctgcccgggctgcctctcccccgctagggcctggtgcctctggctggaggctccctcccttggccgtcccaatagagcccggggctacttccactggccaggctcccgggcatctggttgaccccagcctggggaggagggctggtctccgctcctcaggggcttagtccgtcccaccccttcccttccctggcgccccgggcccaggcccctcagctgtcagctggttttgatggcctcccactgccccacacgccgcgggacctccaggggcgactctagtggcctgaggagatgtatttataggcccccagcagggctgctcccccctcggccggtgccccaggatgggctcctcccggcgggggcttggccaaagctttcttaataaaatgcctttcccctcaaaaaaaaaaaaaaaaaaaaaaaaaaagaaaaaaaaaaagggggcggcgggccgactccaagagagtatcccccacggaanggggccccaaagataaacgcgcgtataacccccagttttcttcgtgtgaacaaagagggggcgcccccccaaaatagagcgggagagccgcgaatataaaaataaagagccaaagagacgaaggggggcacccagtacgagattacacaacaccaccgtttgcggagaactggtggcgaacaaaccggctgacactagcgcgtgcgcggaaaacacttgtggggggaaaggagaaaccccttataatcatgcccgggggggcggtgatcgcacacaaaaaatgtggacgaaccagaaaactactacccactgaacaaggaaataattataaaagaggccctcataagggggaacaacatttattaaaaaatgtttttcaaaagcgtaggggaatatacgggggtgggtaaacaaccaatagggctgggtaatatatgaggatatgtcagctgtggatagagagacaacgtctggcggagaaaacggaggaggatatacatattatagggagcaacaatatttttaattaacccaggggaggttaatttgtgtacaaaaaacacgcgccacacacccaacagaacgcagacagaagcaacacaaggaaaccgacatcgacgagcgagacaagtagcgagacacgaaccagcgtacgaagcacggactacaaaacaacaagcaaaaccaaaaggcgtgcgcaggacacagagacgaggacaccgaacagacacaagcgagagccagagaaacataacaacagtagacaagacacacgcaacaaaacgccaactaggagaaagacacacacagacacaccaaggcacaaagcgggg

SEQ ID NO: 7387 - DNA, 2466 bp, Homo sapiens
ggagggggaggcggcggcggcagcagacccctctccagggagtccaggacctgccagcgctggggattcttcccgaacaggcgcttgccctctcttttatggagcttgggcccctgccgcagcccggtagaggctgtggaggtctaccgtccggaagcctggttcccagccccgtggcccattcctggctacggggagtggaggctcccacgaggtagcggtggcctgcagcggcctcctccccgcagtgaagcatgggccagaagctctcggggagcctcaagtcagtggaggtgcgagagccggcgctgcggccggccaagcgggagctgcggggtgcagagcccgggcggccggcgcggctggaccagctgttggacatgccagcggcggggctggctgtgcagctgcggcacgcgtggaaccccgaggaccgctcgctcaacgtcttcgtcaaggacgacgaccggctcaccttccaccggcaccccgtggcccagagcaccgacggcatccgcggcaaggtgggccacgcccgcggcctgcacgcctggcagatcaactggccggctcggcagcgcggcacccacgctgtagttggtgtggccacggcccgtgctcccctgcactccgtgggctacacggcgctggtaggcagtgacgccgagtcgtggggctgggacctgggccgcagccgcctctaccacgacggcaagaaccagcccggcgtggcctacccggcctttctggggcccgacgaggcctttgcgctgcccgactcgctgctcgtggtgctggacatggatgagggcacactcagcttcatcgtggatggccagtacctgggcgtggccttccgaggtctcaagggcaagaagctgtacccggtggtgagtgccgtgtggggccactgtgaagtcaccatgcgctacatcaacggccttgaccccgagcccctgccactgatggacctgtgccggagatccatccgctcggccctgggccgccagcgcctgcaggacatcagctccctgcccctgcctcagtctctcaaaaactatctgcagtaccagtgagccaagcctgatgggcagcacagacacagacacacaccgcagggcccgaccctcctgtcattcacagtcccatggcacataggggaaaggatctacccttctcctggctccccaggacactcagttctttcaaagaccaggatgtggtaccaactttggaaacgaaaggtctcttgccaacagtatctactgccctcgaggcagccctcccaagtcagacacctccttcggagccacagagagcctggagtctgcacctcctggaaatcctgccaccaaccaggacacagcagccaccgtattgatcagagagcctgtttccttattcaagagaatgaataaaacatttaggcaggagactttctattgtgtgccccgttgcagacagggccagggagaaattagccagtgcagggggaaaattgcctctgaataatgaatgatgaaagcctgacgccgtgcccctcctggcccatacgccttgccagggcggcaggattgtcacaccgttttaggactctgtgccactttgagagactgttcccaggaggcccaaccgcagacctggcaagtggacagtgcagtgtggagacaccttccggcttacctctttgaacgttgtttacctacccctttccacgtgctccccttcccagccactgactcacagttctctggatgcccagacacctctcttcagggaagatgagtctgactggtttgccccagggaagagcgtatccttaccattattttaagtagcatttgcattttaaaagaggaatgcggagaggacagtacttagtccaaaggtgctaacgggggaactgggggcattgtgacacccaagtctgatgtgtcctgggttggggggccttcctggagtgtcagggtctctgggcaacgtccattcagggtgcggcatggctgtcacaaagctttatttgagcaaattattttttcactttaggagacttctacaagtttgtttcctgtttcaaatgtgtgtgtgatgtgctgtttatttatcagcttgaggtccatgggggcagccttgtgactggaagggtggatatgggagacacattctctacctgctccgagcctggtcctctcgcaggaatgctgctgctgcctccgccgccactgctgctgccacctcttatatgtttcagacactctctgcccagactcatttttaactggaaatcatcacagcagtgggatatcagagccccagacagcactgcctcttcctccccaccccactgcccccaccttaatgtgaatttgactgatgaatgaagagcgtttctaataaagtttgtcattcagtccttcaaaaaaaaaaaaaaaaaaaaaaaaaaaaaaaaaaaaaaaaaactcgagg

SEQ ID NO: 7388 - DNA, 573 bp, Homo sapiens
tttttttttttttttttttttgcataaatataagagcacagactctggcgccagaatgcctcatttaaaatccctgctacatcatttattggccatggtatgttgggaaaattacttagcattcagcatctagcttcctcacttgaaaatgggaataaaacagcacctattgcataggtttgtcgcgaggattagatgagttaattacatgaaaggcgcttagagtaagggctgagtaaatattagctatccttattattaaacacagctggggcataggaatacatgtggaggagaagggatgtgaaacagaacagagaagacagcaaaagtaatctgctgtgtaatgatgagaatggagcactttccacaaattatcacagacctcaggaaaacctttcagtgcaggttaacccgtccaagccacatagccagtaaatagccgtgctggacttgaacccaaacagtttgtctccagagatcccatcctgaaccaccaagaaacactgtcttccatgatcacactttcccctttagggaaaggaattcctgggttatgaagggaagccaaag

SEQ ID NO: 7389 - DNA, 942 bp, Homo sapiens
ggatagtagtagattgagatggaatattttccagcctcatcctggctgccctctagactccagtcctccaagccctcagcctagtgggtgtcatggatggatcctgggcggtagtcagacacggcttaccctgtgccagggagggggcagaatgggcctgcagcttcctgcagaggaagcaggactgggtagcagagccgggaaggtgggtggcccattacaggggggtccccagggtgtcctctggcagggctgtgactgctgcaagctctgccttcaccagtagctggtgccaggacagagctctgggacagcaggcagaggccgagcctgggccacagctcagccactgacttgggtatcagtttccccttctgagaagtacagagtgagacttaaagaacccctagatccccaccagttcaacactccattaactgggaagcccagagtcctgtccggcctgccaagttcatcctggtggacagcgggaggcctccgctaactgttctcttcttttccttattaataaaacacacaatgcctagctggggggtcggaaggcaaatgccctagatggtggggtcacgtctttctccttctccttcctccttctgctggctgaagtgatgactggagctcagcaaccactttgcaccatgaggcagcactgagcacggtagggcagcctggtgagaggggcctagctcgctgccgacagaagtcactgcctacctcagggtccccttacctgggtgggaaataaatttctgctgtgttgaagctaaaaaaaaaaaaaaaacaacaataaacacacattaagacaaaaacaacaaaacacgcaaacggccagacaagaatcgagcaggccggacacacacgagccacagacgaagccacaagaggccgaccgcaacaaaacatacctgcgggggcagaaca

SEQ ID NO: 7390 - DNA, 801 bp, Homo sapiens
  misc_feature (13)..(13): n is a, c, g, or t
gtaatttggggtnccctaagtggaccaggagttatccctaaaagaagtaattaatagttgtaaatgccggaccccctcaaagttgaaaagtagattgaaaatccccattatttttaacaaggtggcccttacctatttatagtttgactgtaggtatggcagtgagagataaaattactttttcctagctttgcaaaacgcccaaacgtctttgaaattaagagtaaaaggggtttaaaatatgtactgctttataaagcaggaaaaccccactggaacattttgggtgtttacagaaatgggtattccatgggagagaacgtggtaacctatgttttgtcatcatttgtttaatcactgaaaatatattaacaggccaggcatggtagctcatgcctgtaatcccagcgctttggcaggctgaggtgggaggattgcttgagcccaggagtttgagatcagcttgggaaacacagtgagactccatttctacaaaaaaagaaaaaagaaaaaaaagtcacatgtggtggcacacccctgtggtcccagctactttggaggctaaggtgggaggatagctcgagccccagagatcaaggccgccgtgaactgtgatcgcaccactgcactccaggctgagcaacagatcaagactcttgtataaaaaagaaaaaaaaattttttaaaaatataaatatagattaacaaagtaacagggaatataatattttcaggttggtcatatagaggaaatactatattgtgttattcagcttaataaaatataaaacaaaaaaaaaa

SEQ ID NO: 7391 - DNA, 735 bp, Homo sapiens; identical to SEQ ID NO: 3408

SEQ ID NO: 7392 - DNA, 510 bp, Homo sapiens
catttaagagagctgagcctgtggagccagatggctgcgttcagagctggcgctgctgtttaccatgtgaccttggacaagcttctcgcttcattcataccacagtttgttcggctattaggtggaggagctgtaagggggagaggaactttgctgaaaggcacatcctccctgcagagcttgaagaacaatctaaccatgctggcatggggcccatcctacctgcaatgccaaggtaagtctgcgaaagtcacttatattcagagcatgtggattgggactctgaagaacaactttatggtggacaccttcgtctccatctggtgagtccagcacaagcagcctgagggttccatgggctcaacctcaccctccatccttatttccctgccactccagggctcctcctcatccagacttgcctgtgagtgccccttgatggatgtatttgtctgttctcatgctgctaataaagacatattcgagactaggtaatttaaaaaaaaaaaa

SEQ ID NO: 7393 - DNA, 1617 bp, Homo sapiens
gtgaggacagaccagccctcccgagcacctggcactcatgggctgaggctgacttctcctgggggagggttccagagtggaaggaagaggcagagggtagaggtggtggctgggggctcctctgcagagtggggtggccaatggagagggctgcactcacaccgcaacataggactctctctcccttaagaaggcccccttagggtctgggctgccgcccccatcaccctaaaaccagccaaggtagctgaggccccagggcagacaatttcaccagcaggaggaggaggagtccagtgagcttggttgctcacagacagcaagggagctgtcacagaggaagctgatgaatggaccgctgtggggagactttaaagtagaacagtgataagggagggcaggatggtggggatgcagaagcagcagccagagagagacggactggggtgcagacggagtgtggaaaacgcataccttgaaatgaagcatccagcagatggggtgagtggatacagctcaggagattctcccaggaatagcagggaggcgtaaagagagacaacgtacagagatagatgaatggaaatgggtaagggaggtgttcattcacatccatctaactgcaaaatacaaaagtaagaagtcattgacatgaagcaacgacgaccaagacgttctcagatctaaaggtgaatgatctcagtcagcctggaaatgcacaaggtggaaaaataacataaaaaagccataagaccttgaagaacatcaatgtcaaagataaattctaaagtcccagagaaaaaagaatgggaatcaaattgacctcagactatacgtgagaaacacggagagccagaaaactgtgatgttccatcctcagagtttgaaggaaatatttgaaggctgaattttacatccagctaaactatcaaaggcatgcaaagtccatgttattcttaggccttcaaggcctcggccatttttctacagaaaagcctgattttaaaatgctcttagagacgttctccagccagaagagaaagaagccaggagggtgctctgagatattcagtcaccacagttcccaaatggcctaggaattcagagagtcagaatatcaccattactccccaatgggaacccccgacagtctcagcatggtgtgagggtgtggacggggggcctggcaggtaccaatcactcatcccgctcagtgaagacacagtgttcagctacggaagccataaggcaggccgagcttctgcccatccggaggaaatctcagctatccaacggcggtcaggagcagaggaaaataaagcagaataactagaaaacacgctcacagatcctaatgttaacggttacaaatgacgacggaaaaacaaactcctgaccatatattatatagtttcaagcagcaagaaggaggatattgaacattctcaacacacataataaacgcttgagatgatgatatgctcattaccctgatttgatcactagacatcccatgtatcaaaacatcactgtgtatccgatgaatatctacaattattgtcaattaaaaacatcattaaaaacagaaaaaaaaaaattaaaaataaaaaaaaaaaa

SEQ ID NO: 7394 - DNA, 2676 bp, Homo sapiens
  misc_feature (1275)..(1293): n is a, c, g, or t
agtcgctcaggctactcccaccccgccccgccccgtcattgtccccgtcggtctcttttctcttccgtcctaaaagctctgcgagccgctcccttctcccggtgccccgcgtctgtccatcctcagtgggtcagacgagcaggatggagggctgcagaactggctcaggaaagccctcctgggatggctggagtggaaaatgaggatgaggcagagctgaatctgagggagcagggtggcttcactgggaaggaggaggtggtagagcagggagagctgaatgccacagaggaggtctggatcccaggcgaggggcacccagagagccctgagcccaaagagcagagaggcctggttgagggagccagtgtgaagggaggggctgagggcctccaggaccctgaagggcaatcacaacaggtgggggccccaggcctccaggctccccaggggctgccagaggcgatagagcccctggtggaagatgatgtggccccagggggtgaccaagcctccccagaggtcatgttggggtcagagcctgccatgggtgagtctgctgcgggagctgagccaggcctggggcagggggtgggagggctgggggacccaggccatctgaccagggaagaggtgatggaaccacccctggaagaggagagtttggaggcaaagagggttcagggcttggaagggcctagaaaggacctagaggaggcaggtggtctggggacagagttctccgagctgcctggaaagagcagagacccttgggagcctcccagggagggtagggaggagtcagaggctgaggcccccaggggagcagaggaggcgttccctgctgagaccctgggccacactggaagtgatgccccttcaccttggcctctggggtcagaggaagctgaggaggatgtaccaccagtgctggtctcccccagcccaacatacaccccgatcctggaagatgcccctgggcctcagcctcaggctgaagggagtcaggaggctagctggggggtgcaggggagggctgaagccctggggaaagtagagagcgagcaggaggagttgggttctggggagatccccgagggcctccaggaggaaggggaggagagcagagaagagagcgaggaggatcaggaggaggggagggagccaggggctgggcggtgggggccagggtcttctgttggcagcctccaggctctgagtagctcccagagaggggaattcctggagtctgattctgtgagtgtcagtgtcccnnnnnnnnnnnnnnnnnnngaggggtgcagtggctggtgcccccaagactgccctggaaacggagtcccaggacagtgctgagccttctggctcagaggaagagtctgaccctgtttccttggagagggagaacaaagtccctggccctctagagatccccagtgggatggaggatgcagccaggggcagacatcattggtgttaatggccagggtcccaacttggaggggaagtcacagcatgtgaatgggggagtgatgaacgggctggagcagtctgaggaagtggggcaaggaatgccgctagtctctgagggagaccgagggagcccctttcaggaggaggaggggagtgctctgaagacctcttgggcaggggctcctgttcacctgggccagggtcagttcctgaagttcactcagagggaaggagatagagagtcctggtcctcaggggaggactaggaaaagaccatctgcccggcactggggacttaggggtgcggggaggggaaggacgcctccaagcccgctccctgctcaggagcagcactcttaacttacgatctcttgacatacggtttctggctgagaggcctggcccgctaaggtgaaaaggggtgtggcaaaggagcctactccaagaatggaggctgtaggaatataacctcccaccctgcaaagggaatctcttgcctgctccatctcataggctaagtcagctgaatcccgatagtactaggtccccttccctccgcatcccgtcagctggaaaaggcctgtggcccagaggcttctccaaagggagggtgacatgctggcttttgtgcccaagctcaccagccctgcgccacctcactgcagtagtgcaccatctcactgcagtagcacgccctcctgggccgtctggcctgtggctaatggaggtgacggcactcccatgtgctgactccccccatccctgccacgctgtggccctgcctggctagtccctgcctgaataaagtaatgcctccgcttcaaaaaaaaaaaaaaaaaaaaaaaaaaaaaaaaaaaaagaaaacaaaaaaaaacgcagatacacaacggaaggtgaaaaaaaaagaagaacacgggccatggacaagagaagacacaagaacacgaacaaaggaaaaaagcgaccacctagaggacacaaccacagaacgaggacaggataaaagagcgagaaacacgggaaaaacacaaaaagggacaaggaacagagcgagagacacgaaaggaatcaagcgcacaggaaaaacagcagaggaagtagagaagacagcagaccaagagcagagtgaagcaaaaaggaaaaaaaaagcaacaatgacgaacgtcgtcgcagccagaacgaaacagcaggcacacccggggg

SEQ ID NO: 7395 - DNA, 3714 bp, Homo sapiens
  misc_feature (2159)..(2180): n is a, c, g, or t
gggccatttttccccttggggggttttttgtgccgctcctggtgtccaccccgccttggggggaaactatgtgtgccccgccatatcgacgcagtccgcatcttcccgtgttgttacaacaggggtttcttcacaattgaagtcctgggttctcgccacgcaactttgggggagaccacgaggttctttgtgtgaacttgggccaacttcatgggcaaacaccaagggggttcaaagggcccagaccacgaaattttttgagaaggggtttgggaagcgcctctacttatgccccggtgactgctccccggaaattaaactctcgccctggaaggacctcgtgatcctctctggaatctcccctttgttgtttttttttttgtgaaaattgagtttaaactcttgcttttttttaatggtttggtgtctgttttttccaccccccgcctgggcgcccggcagctgcgcctgttttgtggattcctttgtttttcttgtttttttttctattttttttttaaattctgaagccagaccgtctttcctcacagctccacggctgcatctccgtgggcacgcaagcttcccctggttacctgagctgctcctgccgtctcccgcctgggcttcgccgtggtgcacccgatcccggaatcgtgcgtctgcgccctgcgaaagaaggacctgctggcggagctccggccggggtctcctgcctcgcagctgggcgaggggacttggaggacagggtgaagctgcagaagacctggggtgggatggctagagaggacgccaaggactggggaaggggaagttaggaataccttacatccaatgcccacccgtgctccgcagggcaagggcagccgtcgcctcggccgcgtgcacccagctcaggctgttcccagggatttagtctggggggacaacccatggcgagatgtggtggcattttacctcagagtggagctgaagatggataaacaaggtatctgatgtatctgcctgagaaggcagagctggagaaaggcggagcgagggagcgcgtgaaaagaaagagatgccgaatgccgggtgattgtctgccgcttgctgtgcactctcattctagggaggatggcataatttataacccagcacatggatagaggaactgtaaattgtagtctggatgtccccggcgctgtcgacgaaggaactgatgggctaggctcacaggcagaaggaattttccttgtcttggatgagacttttgacttggacttttgggttaagttctggagaccagaaggccaaaatcaaaagtatgggcaggcttgatttctttagaagactccagcggagaactgtgtctccttgcttctgattctacatctccatccatgggccactgtttcagcaacctcagccagtgcaacacaacctcagccaagaagagtatgcagagaaaggagtcccctacctgccacaaaactgttgtctgaaaactgtctcatattgtctcaagttgtcattcattgtgaattagacctgtttaacatgtaatctgcaacatgcttcactgtctaattttccagagcccctcatataaggaactgtattattggtataatcatcatggtgaagaagttggtatgtgggggagagatgacagaaacagagagtaagtcagagctggctgcctgacagataaaaaggaaatgaccaaaaaaaaaaaaagacacagaagaatactttgttgtccacacagaaaagggaagtgtaggtaagacagcagtagactaagattcttaagactcaagttctagtcttatttattagctatgggaggccttgagggagttctagaattaagtgatctctctttataaaataggaacagtaataacttcctggctaactccctggctgtctcacaatgctgtagtagtaagaaataattttataattaaagactattttagggctgattacatttttgggcagtggctcatacatgtaatttcaacattttgggaggccaaggtgggcggattgcttgagcccaggaattcaagaccaggctgggcaacacagaccttgtcactacaaaagaaaaaaacattagctaggcgtggtgatgtatgcctgtggtcccagctactcaggaagctgagacnnnnnnnnnnnnnnnnnnnnnngaggtcgaggctacagtgagccatgatcacactactgcactccagcctgggaaacagagtgagactctgtctcaaaaaaaaaaaaggaatattttacacttcaaggttctatacaaatgtaaaatatcattctattacttatttataatgctgattattctttaaatgactttaaaatgttaatctctgcttgagcctacggagaagtatgtaacaaatttgtgaaggattggcattaaagatagtcaaaataaaacatagaaattatggtaaataatttaactggtaaaataatctaagtggtagttctcaggtaagtggaaattcgattagctgattgtttaggattcttggttataagtgacagagacctgactaaaagtacatgaagcacataactgagaaggctgtggtatggctcagcagaaatgggaaaatcttgggactggttcgtgttttatttacattatctttgttcccaggcagtctctgcatgtaagtggcaaagatgactgtctgaaaatatatacctacttttttaaagggctatctcaagccattctggagaagcaccaaaagccactttgcttatactgggagaatagtttgctttccctaatttgtgatgagtgaaacactgaacagagacatagaataatattctgtagttcaggggttggtgtaatatggccagtgggcggaatctggtcctcagactgattttgcaaataatcttatagaaacacagcaacacccattcattacatgttgtttatggttgctttggggttacaatggcagagttgagtagttgtgacagagatcactaggctcaccacatctgagatatgtactgactgaccctgtacagaaagtttgctgctcttagaggaatgtgtgtttctagtgtcagcaataaacttcttggatttgtttagttttctcatctttacatgatagttgcagactagttgatccttgtgacctgtttttgaatgccactgtgtattctgtcagggccctctgattctgtttcttatggtgctgaatgcaatttaatgccctggaatttccttctgtcttctgctaaactcatgcctcttcagatagttaaaatcctgttctaccttagaagtctccagagttatttttcctaaattagaagaactggtttgaagttactcattatgccacacacatggttgaaaagagcatctcttattatgtaaccgggtattaattcaagcaatccaatcagttcgttaggctcgcaacagcagcgcctccaccgggtaatttaatcccaatttgggtagaaaaatccttctttaccagggctgccggcaacaaaaaatgggctggacagagggccgggtatacaccaaacttcgacaaccggtcggggagaaaaccggtaccacgttgggcgcaacggcggccaggccgataaccggcccgtgtgacgctctaaaacaaaatagggcgaaacacaaaagcggaaaaccgggcaaaaccacagaatcataaaaaactg

SEQ ID NO: 7396 - DNA, 3119 bp, Homo sapiens
tcccattttgtttctttggatttggggtgggggtcctggccaagaactcagtcatttttttgtgtaccaggttgcctaaatcttgtgcagatggttttaaaaaaaaaaaaaaaaaaaaaaaaaaaaggaaaaaaaaaaagaaaaagaaaacgtgtgcattttgtatggtggccagaactttgtcgtgtgacagtattagcactgcctcagttaaaggtttaatttttgtttaaacctagacgtgcaacaaaagttttaccacagtctgcacttgcagaagaaagaaaaaaattcaaaccacatgtttatttttttttttcctacctcattgttcttaatgcattgagaggtgatttagtttatatgtttttggaagaaaccattaatgtttaatttaatcttaataccaaaacgaccagattgaagtttgacttttattgtcacaaatcagcaggcacaagaactgtccatgaagatgggaaatagccttaaggctgatgcagtttacttacaagtttagaaaccagaatgctttgtttttaccagattcaccattagaggttgatggggcaactgcagcccatgacacaagatctcattgttctcgatgtagaggggttggtagcagacaggtggttacattagaatagtcacacaaactgttcagtgttgcaggaaccttttcttgggggtgggggagtttcccttttctaaaaatgcaatgcactaaaactattttaagaatgtagttaattctgcttattcataaagtgggcatcttctgtgttttaggtgtaatatcgaagtcctggcttttctcgttttctcacttgctctcttgttctctgtttttttaaaccaattttactttatgaatatattcatgacatttgtaataaatgtcttgagaaagaatttgtttcatggcttcatggtcatcactcaagctcccgtaaggatattaccgtctcaggaaaggatcaggactccatgtcacagtcctgccatcttactttcctcttgtcgagttctgagtggaaataactgcattatggctgctttaacctcagtcatcaaaagaaacttgctgttttttaggcttgatctttttcctttgtggttaattttcctgtatattgtgaaaatgggggattttccctctgctcccacccacctaaacacagcagccatttgtacctgtttgcttcccatcccacttggcacccactctgacctcttgtcagtttcctgttcctggttccatctttttgaaaaaggccctcctttgagctacaaacatctggtaagacaagtacatccactcatgaatgcagacacagcagctggtggttttgtgtatacctgtaaagacaagctgagaggcttactttttggggaagtaaaagaagatggaaatggatgtttcatttgtatgagtttggagcagtgctgaaggccaaagccgcctactggtttgtagttaacctagagaaggttgaaaaattaatcctacctttaaagggatttgaggtaggctggattccatcgccacaggactttagttagaattaaattcctgcttgtaatttatatccatgtttaggcttttcataagatgaaacatgccacagtgaacacactcgtgtacatatcaagagaagaaggaaaggcacaggtggagaacagtaaaaggtgggcagatgtctttgaagaaatgctcaatgtctgatgctaagtgggagaaggcagagaacaaaggatgtggcataatggtcttaacattatccaaagacttgaagctccatgtctgtaagtcaaatgttacacaaaaaaaaatgcaaatggtgtttcattggaattaccaagtgcttagaacttgctggctttcccataggtggtaaaggggtctgagctcacaccgagttgtgcttggcttgcttgtgcagctccaggcacccggtgggcactctggtggtgtttgtggtgaactgaattgaatcccttgttgggcttaagttactgaaattggaacaccctttgtccttctcggcgggggcttcctggtctgtgctttacttggcttttttccttcccgtcttagcctcacccccttgtcaaccagattgagttgctatagcttgatgcagggacccagtgaagtttctccgttaaagattgggagtcgtcgaaatgtttagattcttttaggaaaggaattattttccccccttttacagggtagtaacttctccacagaagtgccaatatggcaaaattacacaagaaaacagtattgcaatgacaccattacataaggaacattgaactgttagaggagtgctcttccaaacaaaacaaaaatgtctctaggtttagtcagagctttcacaagtaataacctttctgtattaaaatcagagtaaccctttctgtattgagtgcagtgttttttactcttttctcatgcacatgttacgttggagaaaatgtttacaaaaatggttttgttacactaatgcgcaccacatatttatggtatattttaagtgactttttatgggttatttaggttttcgtcttagttgtagcacacttaccctaattttgccaattattaatttgctaaatagtaatacaaatgacaactgcattaaatttactaattataaaagctgcaagcagactggtggcaagtacacagcccttttttttgcagtgctaacttgtctactgtgtattatgaaaattactgttgtccccccacccttttttccttaaataaagtaaaaatgacaccctaaaaaaaaaaaaaaaaaaaaaaaaaaaaaaaaaaaaaaaaaaaaaacgacagaaagaaaaaagacagagaaaaagagacgaaagcgcgaaaacaacacagagaacacaacaagaggagatgagtgggcgcgtcagaatgaaagcgggggccaccaccacgcaaccaccatgaaagaagacgacgcaacagaaaacaaaaaaaggaggccgacaccataacggaggagaacagaagagaggagaagacatcgatcggggagaaaagagaccacagcaacagacggaacaaggatgacgcacaacggagcagaagaaaaaaa

SEQ ID NO: 7397 - DNA, 3205 bp, Homo sapiens
acagcatggagtggggttacctgttggaagtgacctcgctgctggccgccttggcgctgctgcagcgctctagcggcgctgcggccgcctcggccaaggagctggcatgccaagagatcaccgtgccgctgtgtaagggcatcggctacaactacacctacatgcccaatcagttcaaccacgacacgcaagacgaggcgggcctggaggtgcaccagttctggccgctggtggagatccagtgctcgcccgatctcaagttcttcctgtgcagcatgtacacgcccatctgcctagaggactacaagaagccgctgccgccctgccgctcggtgtgcgagcgcgccaaggccggctgcgcgccgctcatgcgccagtacggcttcgcctggcccgaccgcatgcgctgcgaccggctgcccgagcaaggcaaccctgacacgctgtgcatggactacaaccgcaccgacctaaccaccgccgcgcccagcccgccgcgccgcctgccgccgccgccgcccggcgagcagccgccttcgggcagcggccacggccgcccgccgggggccaggcccccgcaccgcggaggcggcaggggcggtggcggcggggacgcggcggcgcccccagctcgcggcggcggcggtggcgggaaggcgcggccccctggcggcggcgcggctccctgcgagcccgggtgccagtgccgcgcgcctatggtgagcgtgtccagcgagcgccacccgctctacaaccgcgtcaagacaggccagatcgctaactgcgcgctgccctgccacaacccctttttcagccaggacgagcgcgccttcaccgtcttctggatcggcctgtggtcggtgctctgcttcgtgtccaccttcgccaccgtctccaccttccttatcgacatggagcgcttcaagtacccggagcggcccattatcttcctctcggcctgctacctcttcgtgtcggtgggctacctagtgcgcctggtggcgggccacgagaaggtggcgtgcagcggtggcgcgccgggcgcggggggcgctgggggcgcgggcggcgcggcggcgggcgcgggcgcggcgggcgcgggcgcgggcggcccgggcgggcgcggcgagtacgaggagctgggcgcggtggagcagcacgtgcgctacgagaccaccggccccgcgctgtgcaccgtggtcttcttgctggtctacttcttcggcatggccagctccatctggtgggtgatcttgtcgctcacatggttcctggcggccggtatgaagtggggcaacgaagccatcgccggctactcgcagtacttccacctggccgcgtggcttgtgcccagcgtcaagtccatcgcggtgctggcgctcagctcggtggacggcgacccggtggcgggcatctgctacgtgggcaaccagagcctggacaacctgcgcggcttcgtgctggcgccgctggtcatctacctcttcatcggcaccatgttcctgctggccggcttcgtgtccctgttccgcatccgctcggtcatcaagcaacaggacggccccaccaagacgcacaagctggagaagctgatgatccgcctgggcctgttcaccgtgctctacaccgtgcccgccgcggtggtggtcgcctgcctcttctacgagcagcacaaccgcccgcgctgggaggccacgcacaactgcccgtgcctgcgggacctgcagcccgaccaggcacgcaggcccgactacgccgtcttcatgctcaagtacttcatgtgcctagtggtgggcatcacctcgggcgtgtgggtctggtccggcaagacgctggagtcctggcgctccctgtgcacccgctgctgctgggccagcaagggcgccgcggtgggcgggggcgcgggcgccacggccgcggggggtggcggcgggccggggggcggcggcggcgggggacccggcggcggcggggggccgggcggcggcgggggctccctctacagcgacgtcagcactggcctgacgtggcggtcgggcacggcgagctccgtgtcttatccaaagcagatgccattgtcccaggtctgagcggaggggagggggcgcccaggaggggtggggaggggggcgaggagacccaagtgcagcgaagggacacttgatgggctgaggttcccaccccttcacagtgttgattgctattagcatgataatgaactcttaatggtatccattagctgggacttaaatgactcacttagaacaaagtacctggcattgaagcctcccagacccagccccttttcctccattgatgtgcggggagctcctcccgccacgcgttaatttctgttggctgaggagggtggactctgcggcgtttccagaacccgagatttggagccctccctggctgcacttggctgggtttgcagtcagatacacagatttcacctgggagaacctctttttctccctcgactcttcctacgtaaactcccacccctgacttaccctggaggaggggtgaccgccacctgatgggattgcacggtttgggtattcttaatgaccaggcaaatgccttaagtaaacaaacaagaaatgtcttaattatacaccccacgtaaatacgggtttcttacattagaggatgtatttatataattatttgttaaattgtaaaaaaaaaaagtgtaaaatatgtatatatccaaagatatagtgtgtacatttttttgtaaaaagtttagaggcttacccctgtaagaacagatataagtattctattttgtcaataaaatgacttttgataaatgatttaaccattgccctctcccccgcctcttctgagctgtcacctttaaagtgcttgctaaggacgcatggggaaaatggacattttctggcttgtcattctgtacactgaccttaggcatggagaaaattacttgttaaactctagttcttaagttgttagccaagtaaatatcattgttgaactgaaatcaaaattgagtttttgcaccttccccaaagacggtgtttttcatgggagctcttttctgatccatggataacaactctcactttagtggatgtaaatggaacttctgcaaggcagtaattccccttaggccttgttatttatcctgcatggtatcactaaaggtttcaaaaccctgaaaaaaaaaaaaaaaaaa

SEQ ID NO: 7398 - DNA, 7300 bp, Homo sapiens
  misc_feature (702)..(712): n is a, c, g, or t
gctgatgcaggatggctgagcgcgcaggagcccgggaggtctgagccgggcgaggctcgctccctgcgcatcgcctcctccgcccgccgcgtggtcgcgggcaggtgggccggggggcgctgggcaggggcggggcagggccagggcaggccggtctgcagccggaggggccggagcggagaagctgcccaccttcccgggctcggagcggccggggctgctcagccggccgggctcgcgatgacctgctgagaagcgtcgtcggaggctgcaggaggcggcctagctgtgggcggtgcagctcgcggcctcctccctcgtcgttcccggccccggccccccacccatccccgtgccccctccctaccgccggccgagatggcggatccagccgaatgcagcatcaaagtgatgtgccggttccggcccctcaacgaagcggagatcctccgcggggacaaattcatccccaaatttaaaggcgatgagaccgtggtgatcgggcaagggaagccatatgtcttcgacagagtgctacctcccaacacgacccaagagcaggtttacaatgcatgtgcgaagcaaattgtcaaagatgtccttgaaggttataacgggacgatttttgcgtatgggcagacttcatcaggaaaaacccacagcatggaggggaagctgcatgacccaaggaatgagatgtcnnnnnnnnnnnttgcccatgatatctttgaccatatctactccatggatgagaacctggagtttcacataaaggtttcctattttgagatctacttggacaaaataagggacttacttgatgtatccaagaccaacttggctgttcatgaagataaaaacagagtcccgtatgtaaaggggtgcactgagcggtttgtgtcgagccctgaggaagtcatggatgtaatagatgaaggcaaagcaaaccgacacgtggctgtgacaaacatgaatgaacacagctctagaagtcacagtatcttcctgataaatattaaacaagagaatgtagagactgaaaaaaaactcagtgggaaactttatttggttgatttggctgggagcgaaaaggtcagcaaaactggtgccgagggagctgttcttgacgaagctaaaaatatcaataagtctttgtctgctcttggaaatgtgatctctgctttggcagaagggacaaaaacacatgtgccataccgggacagcaagatgactcggattcttcaggactctttgggtgggaactgcagaaccaccatcgtcatttgctgttctccttctgtcttcaatgaggctgagaccaagtccacactgatgttcggacagagagctaagaccatcaagaatacagtctctgtgaacctagaactgacagcagaagaatggaagaagaaatatgaaaaagagaaagagaaaaacaagactttgaagaatgttatccagcatctggagatggagctaaacaggtggaggaatggagaagctgtgcctgaggatgaacagatcagtgccaaggaccagaagaacctggagccttgtgataacacccccatcatagacaatattgctcctgttgttgctggcatctctacagaggagaaagagaagtacgatgaggagatctccagtctctacagacaactggatgacaaggatgatgaaattaaccagcagagccagctggctgaaaagctgaagcaacagatgttggatcaggatgagcttttagcttccacaagaagagactatgagaagatacaggaggagctgacacgtctccagattgaaaatgaggcagccaaggatgaggtgaaagaagttctccaggccctggaggagctggctgtcaattatgaccagaaatcacaggaagtggaggataagacccgggccaatgagcagctgacagacgagctggcccagaaaacgactacattgacaaccacacagagagagctgagccagctacaagagcttagcaaccaccagaagaaaagggcaactgagatcctgaatttgctgttgaaagatctgggggagataggtggaattattggcaccaatgatgtgaaaactttggcagatgtgaatggagtcattgaggaggagtttaccatggcccgcctgtacatcagatgaagtcagaggtcaagtccctggttgaaccgcagcaaacagctcgagagcgcctagatggactccaacaggaagatgaatgccagcgagcgggagctggcagcctgccagctgctcatctcccagcacgaagccaagatcaagtctctgacagactacatgcagaacatggaacagaagaggaggcagctagaagagtcccaggactcgctcagcgaagagctggcaaagctccgagcccaggaaaaaatgcacgaagtcagcttccaggataaggagaaggaacatctgacgcggttgcaggatgctgaagaaatgaagaaggcgctggagcagcagatggagagccaccgggaagctcaccagaagcagctgtccagactccgagacgaaattgaggagaagcagaaaatcattgatgagattcgggatttgaatcagaaactgcaactggaacaggagaagcttagttctgattataacaagctgaaaatagaggaccaagagagagaaatgaagctggaaaagctcttattgctcaacgataaaagggaacaagccagagaagacctcaaagggctggaggagacagtgtctagagaattgcagacactgcacaaccttcggaaactctttgtccaggatctgaccacccgagttaaaaaaagtgtggagttggacaacgatgatggagggggcagtgctgcccagaagcagaaaatttccttcttggagaataacctggagcagctcaccaaagttcacaagcagctggtccgggacaacgcagacctgcgctgtgaactgcccaagctggagaagcggctgcgtgccacggcggagcgcgtcaaggctctggagagcgcgctgaaggaggccaaggagaacgccatgcgggaccgtaagcgctaccagcaggaggtggatcgtatcaaggaggccgtgcgggccaagaacatggccagaagggcccattcagcccagatcgccaagcccatccgccccggacactacccggcctcatctccaacggccgtccatgccattcgagggggaggaggcagctcttcaaattccactcactaccagaaataaatacaaaatatgactccacgtagcatgtcaaggactacattaatcaccaattcctttatttttccccccctacagtttccattttttttttatacttgcttactccagccatctgcagtacaccagtttcaggtcttttgagctgtgtagagtttctgtgtgtacagatgtgtgctcggacttttctctttttgagaaatctgaaggagatggttgcagaagatccacttactactgagaaccattaccaccgactcggcctccggggtgttgggtggtttctgggtggttcctggagcctcctctgggcagtgcactgtcccatctgtacgccctaatgtgccattccctagaggggaacaaccaagtgccgtggaggcagatgatcatggtctgcctcaactgtctggtttcctgtaaaataaacacattgttttatatttttagggaacaaaaagtgctgctatagggttcaaagttttccttctgaacacttttccgaaacaaattaccccaaagacacattttgaatatcctggtcacatctttggatctgtaaaatataccttttagtatggcacctgttaaaatgcaaagcaaatttctttggggcagaaaaacaatctgacagtagcagtgtagaatttgttcattcaaatacatctgtgtaaatgcaaaaagtcataaaattcacctccgagctgcttgcttttgaacctgcagcaactagtcttagccggcccggtttgaacatcgttctttcagaagtgctgaaaatgctgcaaagttggataagtggaaatgtggctgcccctctcctcactacttcctctctgatcgttctgaagcttgcattgggaatggctgctttctctaaccattttcagcttgagtgggtattgctgaagaaatccaacatcattccagcagttgaaaaaggaagccttcgggagaaagtgcttgtcaaaattttgttctttgtgcttgtgtatgagtaagttgccatgaataagttattattttaacccataattggcgactgtttatatgaattctttctttggcaccaaataggtttcatcttcttaggcacaattagaaaaaatccacatagatggatattttacatttagttattgctttatccaaatacatgaatctaaagctgaatcaacccttacttccagttgtgcttattaagaagatcaatttccaagtagtaaagttttcagggaaactgactgtgctgctatttgttttgacaaatttgggggtaagtcaatgacaaccaaaccaatctcggtggaaactcctatcctatcatgttgtgtgcccaagatgagtgagctggcactgtgccctgaagctttcaccactgtaatgaaatatatgccaggggagactttgggcttttctcatgactgtgtgggtcgaaggtagctcaagtgtgtgtgtgtgtgtgtgtgtgtgtgtgtgtgtgtgtgtgtatgtgtgtaaagtgctaagaactgtgcattgacatccaaacatttcttgtacaaaatttccctagcaaagcaaacctgctttgacttaatttatttgttaaatgttgcactttgtttatgtatgttttgtttttggtggggaataaggagagagaggacgacaaattctattgaagtatttattttgtgaagatggcaattttgcatttgtttaaatttttttcattctttaattttgttatcagtgccagcccaatatacctgctctaccattatttgcggtctgataaaagggtccttgtggggcaggttttgcaaagcttatcaggtaataacatatgccacataaccttgttgatatgtttgcttctgatttgggaagctaaacattggtgtttgagaggattgccaattattaattgtcattaccactactctccattactttttgtttggaaattgaacaaaggtcagtaatggtttttggctcttgttaatatccatcataaaatagattgttttagattctttccagggtgatttttccctgggtaccccgtttctacttctaaagaattgcttggcactttcatgtttcaaagggaaacattcgcttgtagttccattttacttgatctctacaagggactgacaacatttgctttatttttattcacagagaaagttggctttgatgtctcttaaagataattctgctagttgctgatcagccagtcagttcacctagcttcaatctttataggacttctaatctaattttcctatagtgtgactaaaagggaggcaaattattggaacggattattcaaatggatccttaaatattgctatgtataataagccagttattatatcaggaccatgttctctgtaggccactttctaaaaaagccacatatgtgcaattttcaggtttttagactattgctccctgtactttaaatgtaaaaaccacacttctgaacaactaagctcatgaatatgattttggttatatgcagcttttgactagcatgtattgtgtctttttctcctctatgaataattttatatttcatgctacttcttgaaagtttactctttgatgctctaagagaacagccagatggtttatatgaataatctttatctgcaggatggtggattggtaaattaggagaatgttgtttgagatatcaagatttatgtctgggaactaaaatatataatgccaaatgtgtttttgtcaattactagagaattctgtgcaaacatatcatctcttcaaatgctgcacactttgcttttgttaaacagcaggtagtagacagaacaataacagtttcgcgttaagacttttaaaggaaatagaatcgtgattaagaaatcagaatttatagatatattgggataaatgaagaaataaaaatgtttgtctagaatgtagcatctagtgactttttaaagccctaacgtttacataaagaagctctagttcttatagaaataacaaagcaaataaaagttcttaacaatcccctctttcgaagtgcatttttttaaagcagggcaggagacatttggactctagctatatgacatactgggaaaggcagagggtggagggaagatttcacttcattgtctagcccagaatcttgagcaagctaaagaaaccatcataatctaaaattgcttcatttaacactaacaatttagactttttaaaccaagcattgaataatggctggataactgccgaagtaagcgccgctccatgaagtctgcttacttatttaaaaattgtgtatcagttttaaatactgttcattgtgtgcagatataaggggaatagggcattctgtagaattatacatgtctagtttgtaaagtgtgtcctgtgtactgcagatgtgtgttctctgggctttatgtatctgtacagtagctttcacattaaaaaaattgtggacaaacttgtccggggggtttgaggggagaatggtggtttatatcaataacgatgctgtactatagtccatgtaacaaaagatctggaagtcaccctcctctggcccacggaaaattttggtaatcttctaggttctaaaatgaagatgtatgggtactctggcagactgcatgttgtataatttgaaaaatactaaaagtggaaaataaaattgaattaaactttgaaaaaaaaaaaaaaaaaaaagggggcccgcctttaaaaaaattccctccaagggggcccccaatttttacccggaacccccctttttttttttaaaaaagggggccccccattaaggggggcccctttttataaaacctagggccctttgcccccccccttttttaaaccccccccccgccgctggggaaaaaaactctccacccctggggagactctttttggggaaagggaacccctcttctccttttgggggggggggggcccccacattagttggggaaaacaatcctctctcccagagaaatataaacacccccccccccggggaaaaaaaaaaaaacatatttttactacgcgggggcac

SEQ ID NO: 7399 - DNA, 8449 bp, Homo sapiens
  misc_feature (741)..(797): n is a, c, g, or t
  misc_feature (7118)..(7135): n is a, c, g, or t
tgagaaaccagccattgtcttcatgtacaggtgcgaccctgctcaaggccagctcagtgtggatcagagcaaggctaggacagaccaggcagcagtcatggagaagggtagagcagagaatgcattactacaggactcagagaagaagaggagtcattcttctccatcacagattcctaaaaagattctcagtcacatgacccatgaagtaacagaggatttttctcctcgggatccaagaactgttgttgggaagcaagatggcaggggctgcacttcagtcacaacagcattgtccctacctgaactggaaagggaagatggaaaagaagacatttcagatcctatggacccgaacccttgtagtgcaacatacagcaacttagggcaatctagagcagccatgatacctcccaagcagccacgacagcccaagggagctgtggacgatgccatcgcctttggagggaaaacagaccaagaagcacccaatgcttcccaacctacaccacccccactgccaaagaagatgatcataagagccaatacagagccaatctccaaggacctccaaaaatccatggaaagtagtctttgtgtcatggctaatcccacctatgatatcgaccccaactgggatgccagcagtgctggttcttccatcagctatgaactcaaaggactggacattgagtcttatgactccttggaaaggcctttgcgcaaggagagacctgtccnnnnnnnnnnnnnnnnnnnnnnnnnnnnnnnnnnnnnnnnnnnnnnnnnnnnnnnnnccaacagcatggaatccctctccagccggcgtgggccctcttgcagacagggccgaggcatccagaagccgcagagacaagcactttatcgaggacttgagaatcgggaggaagtagtgggtaaaatccgaagccttcatacagatgccttgaagaaactggctgttaaatgcgaagaccttttcatggctgggcagaaagaccagctccgttttggagtggacagctggtcagacttcaggctaaccagtgacaaaccatgttgtgaggcaggtgatgcggtttactatactgcttcatatgcaaaagatccacttaataactatgcagtcaagatctgtaagagcaaagctaaagaatctcagcagtattatcacagcttggctgtccggcagagtctggctgtccattttaacattcagcaggactgtggtcatttccttgctgaagtccctaaccgtctgcttccctgggaggatccagatgaccctgaaaaggatgaggatgacatggaagagactgaagaagacgccaaaggagaaacggatgggaaaaacccaaagccctgttctgaagcagcatcatcccagaaagagaatcagggagtcatgagcaagaagcagaggagccacgttgtggtcatcaccagggaggttccatgtcttactgtggctgattttgtgcgagactctctggcccagcatgggaaaagccctgatttgtatgagaggcaggtgtgtctgctgctcttacagctatgctctggtcttgagcacctcaaaccctaccatgtcactcactgcgatctacgcctagagaacctgctacttgtccactaccagcctggggggactgcccaaggctttgggcctgcagagcccagccccacctcatcttatcccactaggcttatagtgagcaacttctctcaggccaagcagaagagccatctggtggaccccgagatcctccgggaccagtctcgccttgccccagagatcataacagctacccagtataaaaagtgtgatgagttccagacaggcatcctcatctatgagatgctgcacctacccaacccctttgatgagaacccagagctgaaggagagggaatacacacgagcagacctgcctcgcatcccattccgctccccctactcccggggtctgcagcagctggccagctgcctcctgaatcccaacccttctgagcggatcctcatttcagacgccaaaggcatcctccagtgtctgctctggggcccccgcgaagatctcttccagactttcaccgcctgccctagcctagtacagaggaacaccctgctccaaaactggctagacatcaagcgaacactgctcatgatcaagtttgctgagaagtccctggacagggaaggtggaatcagccttgaggactggctttgtgctcagtatttggcttttgccactacagactccctcagttgtattgtgaaaattctgcagcaccgttaatgtgtacctggatgatgcttttactacatcttcaccttcttcatgtcacccatgcacttcccctccctagtgctcactccaaattcaaggaaagaagaaagacaaacctctatccctgtccgtgaacaagtgggtctattcagaaaggttatccactgccccagattgaatgagaagctgagtctgtcttaactttacagaaattcagctgcacaaacttgcagttgccttcccttgaaacaccttctatcctaatagtcccataaatgcaggtaaaaatgaaaatccatattcttgaagggacagcttctttggtatgaactcagccagtgagctgtgtccatttcctccataattctggatatcacctatctttttagcaccaagtatttattctcactagcagtagacagacttaaccagtctctaccacgacccagtagactctgacaacagactcttcctttaaggtgtcaacaactgacttactaggcaggactgccatccttagcatcagcccagttttggttaccagggactatatcttttgttccaggagagagtagaaagaaaaggagagatcccatccttgggtcatagacccattttcattgccattatctgtaagtatgtgcactgcatggaggacagccctaatagtctcccctctgctgccactgcctgattctccactctgtccccacttgccagtgaagtttggatttatcagccacttgtggcccattacagagctgacccaaggtggtgtcaccaatgcctcagcagggtggagtgcagttcagagcttataaatagctggcagggcatgaggagatgattttcttgcatgtgcaattctctaggggccatcaggaaacagagtttaaagtaccctttgattactgtcagaactgtcagcatttgcagttttccccgagcagtaattggccagctcccttctatcagtagccagtgttaactagtttaccaaatgctgtaaacaattgccctgaatgaaatagctgtcagtggagctctaagatctcctttagagggcacagtgaggtgggctgttgggatggccgtaggcaggggagaggaagaaggccactgatgagactgctgacctcctcagaatgttgacctcttctagagagactgcctcccagtgtttaagtggctcattgctccttctgactctgtaaaatggctctggaggacagctcacaggaattctgattgctgaggtgggtgattgagagctgttcaccatgtgtgcagcctgtgctccccttctatggatatgtgtgcaatttttgtatgtatttttttagctgtatattacagtgtttatgttgcaacttcaaaagaagcgagtctacagaaaccctcccccttcttcccttggcacatatttgcgctaagagatgagcgttccttccactggggttgtgtgtgtgtgtgtgtgtgtgtgtgtgtgtgtgtgtgtatgtatacacatgttcacctgtgcttgttttattcaaaactgtgagtatgtgtttactttgaccttgaaatcccaagagtcactcgaacaatgtgtgtgtacacttgtgtgcccatgtgtgcgtgcacacgcatgctggaagtagaggccaggcctctagaaaagcaacctgtggcagggttgacagacatgttctctgtgcctagtgagtgagtgagccctgaggcccctcatctaccagtgcagagtttccttaaagccaagactgactgtgcagtattacttacatagcacattagtggccttggaaatttctaaacttttaacatttttaacagcttttcatgtgattcatgtatatcaaagaggatcaggaaaggaaaataatgtattttattgtgctcttattacttttttaagtgattgtaatatgtgaggctctatttggagaatgtcccttatcccctggccagcaatataggactcacaggaaagaaggctggttagcccacaaagagtcttgcctcctctagccagagtgcagggctctgctcctaggaatggccatggagtgggcatgctgctgcaggccagcagtctgctcttggtgtcctgtggcatggccgcgccttgccttgaaggttggtgtttggttcatcttagcatagaacatgtgcacataactccttgcctgattatgcactgaagggcagcacacagaccactgaccatgtcagccagcacattcccttaacctcccccacctcccatcttgcaatgtcttgcatattgagatataccttctcaatgtcatgttcgtggtgccttgcccatgtaaatttgaatgttgactatttaatgaggttacatatttaatgctgaatgtttcctggtccctctatttgttatgtctctacttatctttttttttctttctctttttctgttatgatttggatccagtcttcactttaactctatggtataataagcatggacacctccactaccattatcttacagcactggtaaaccaagcacctcttcatatcagatgtttttagtactgtttttatattcagatttgttaagggcaaaagatgaatgcaaactagccagagaaaagcctcaggcttcccagagacaggtggctagattaatttttctctgggtgatggccaaagaatgtgagatagagagggaagggggtgttacaggttagagcagaatagagaaagaaactatatttctaagcaaaaagtactacatgagttggtcttcagaatatttttccaaaaaaatgaaattcagtcagtttaacattatcacaaatatttttcattttaattgtggtaggacctttgaatttgttcatcaactggaaagaaatcctaccctctgtagacacatacacacacatttatatatctatgtgtttgaattgtgactagtatagcactttacattttctcaagtaacaggaagttattgccttcaatattgattggaaattgttttctattgaagtctatactgtagagttttccatttatattgagagtttgaacaattaagctcctattggaacttttccttaagccacatgagcatgaacaatctctgtgacacttgggtgctagagaaacacaacagtggctaaagtagccaagagcaagactgaatgtatagcagagtgccttgttagagtggtaacctagtcttggaagcaattcagtggatgtttcataaagaggactagaacttcaagaagcctcctgtgctggctgaggtgagcccttttggtatatgtacactactgggttgcctagaagccaattcatgaagaataacagcaggatgagaaaaagagtcactgtaacctgtggaacaacaacgtaagaatcaccaacccctaggctgagctagaactggaagccaggaatatggcaatgagtttcaagatttgccctcagaagatgaactgggtgaggtatgggttgaggtgagggcacaagcactcatcctacctaccctgctgctgttgaggagctagaagtaaaacatattggttaggattttaacagttggagtagcctcccattatcagattaagtgggggtcacttttgcttccaaactcagaataagtttgtaaacatgggaaagtctaagccaagagatctaaagctctagaaatattaatgacatttctgggagtaaaactactaaaaattatatcttaaaagtttctagtagtataaagttcccaggccaggcgcagtggctcacgcctgtaatcccaacactttaggagggcgaggtgggcagatcacctgaggtcaggagtttgagaccagcctggccaacatggtgaaactccatctctactaaaaatacaaaaattagccgggcatgatggcaggcacctgtaatctaagctactcgggaggctgaggcaagagaatctcttgaacccaggaggcaaaggttgcagtgagccaagatcacgccatcgcactccagcctgggagattgagcaacttcgtctcaaaaaaaagtttccaggaaagatctttgggtcctactaagcgtctcaattttgagttatgaatactttggttcagggaagtaacctgacatttggttttgctggaattagggttttcgctagatttgactgcaattaggatttcttctagattttaccagcagtgatctgaaaaagtacaggctagtcacagaaatagagatggatttaggatactacactatatttcaaatgattctagatgtgtaaatatagtatgaacattcttggagaggggtgagacaaactggacttgctgggccaaccctggcatgtttttcattctcctcactagttgacaaggattgaaaattccgctccagcctaatgagtgaacaggatggctgcccacaaaaccaagttattagctttatgtcatcgaagctcatattctcaaaggcccaaagtgctgtgccgagacaaatccaagtgctgctcttgctgaagtgcgcactgaagtccagctgtccgtgcttacagcagtgccaaaagtggggattccatggaccaaaaacggtgccataagggaagccagaagagttgcagtgcaagatcctgggagagattataccaaagaaatcaagcctttttatcctgatgcttctaagatgatgagggtgagctgtgacagatgctgtgggaggggagttcacatacattccatgtcaaggcatttagctgataaatccatcctcagaaaagcacctttttaaaaagaagtccatcctcagtattttagtggagggnnnnnnnnnnnnnnnnnngaaagccctggcagatacaaagttcctcagtatttaaggagaaggatctcttccatgtccccttgacatgactgtggctattgcccaaacctcagcttgagaacatcatataatactgagagcggaagatttttttaaagagatatggtagtttaaataggtttgtttaaagaactcttgggaaatttcttaacaaattgtaattgtttttataaaccttcctacagagttgtgtaccattcatcatcaccatcatttaatatctgtaagtgcccagaaggtacaaggtgctatacagccgttaaacaccccctccctgcaactgtttaaaattagaatagatttttgcatcaaccactgctagaagctttccccacctaggtgggctgcaagggcctgcattcccaacatcccattacatgtttcccactccagaaagtctctgggtttattccagctttttatcttgacgtgtcccattcacccccatggtttggtttggtttggttttgttttttaaatcaagaaagtttcagggaatcaaaagaggtcggacattttttaacctagcagaagtacagagtcatatattttgctacgaatattgttgtagtacagaaaacccactttgcccgttagtgtgtggatagtatgtgtgtgtccgcactcatgataacttgaatgttgaaccagacatagggttcatttttgaaaggttaaaccacactgtttcaggaacttgctccaaatactacttggttatcccttcctttaccagttagaactaaagagtgtgatgtatgaacacactgggttgggattttctgttgaggatatgcagggcattttggcatgaggcaaatacagaagcaagatttcattctacttggtgatttgaatcatgacagtcctcattccaatctctctttaattctctctggccctgcccacactctgtatttgaaaatcttgtttttgctctttccggagcttcacccctctacttacatattgtaaagttgtataaatctatcattgaaaggtcctctctgccagcagtggtgccaccctttggtttgctgtggtactttgctgtgtactccgtggcatcatgttactgtgtaaataaattcattttaatacacactaaaaaaaaaaaaaaaaaaaaaaaaacagaacaaaaaagaggagagtataaagaaaaccagggagaaaaagaacaccacgattttgctaaaaggcacataaggagataaaaaaaaaggcactaaaactaaaggaaaaaaacgaatttgaagaaacaagggaaacaac

SEQ ID NO: 7400 - DNA, 573 bp, Homo sapiens
acccacccataccccacactcagcctctgaccttactgtgtcccctgaccccctcctttcccccacagcccaccccttggatcatcctccccttgactccctcaccctagggccaactcctggtcagagcccaggcccccatggtccatgtgtggccccaacaccacctgtaagggtcatggcttgtgagccacctgccctggtggagctggtggctgctgtgagggatgtgggtggtcagctgcagagactgacccaggtcgtggaacaggagcggcaggagcgccaagccctgctgctggggctgacgcagctggtagaagctgcccggggtctggggcagctgggtgaggctgtgaagagactggcagagatggcctggaccaccagcatgcctgcaccaaccaccactaccccagaggaagaagaaagacccctgaggggagacgtgtgaccctctccaggatttgaggggcttaagacacccccaaccaaaaaaaacaaaaacaaaaaaaaaccccaaagtatctaattaaaaaaaaaaaaaaaaaaaaaaaaaaaaaaaaaaaaaaa

SEQ ID NO: 7401 - DNA, 3731 bp, Homo sapiens
  misc_feature (1390)..(1458): n is a, c, g, or t
agccaacaccgcctttctcagcatggagacctttgagcccatcagccaagagcccctcagccaagccagctatgacaaagccccagacccagttcctgagctccaagactcgttctatgcagaactgcaacgtgcagagagcctccaagagaagagcataaaagaggccaagaccaaatgcaggacaattgcatccctgctcactgcagcccccaacccccactccaaaggggtacttatgtttaagaaacggcggcagagagccaagaagtacaccctggtgagcttcggggctgctgctgggacaggcgctgaggaggaggacggcgttccccccacgagtgagtccgagctggacgaagaagccttctctgacgcccgcagcctcaccaatcaatctgactgggacagtccctatctggacatggagcttgccagggcgggctcaagagcatcagagggccagggctctgggctgggagggcagctgagtgaggtctctgggcgaggggtgcagctctttgaacagcagcgccagcgcgcagactccagcacccaggaactggcacgggtcgaaccagcagccatgctcaacggggaaggcctgcagtcaccacctcgggcccagagtgctcccccagaggcagctgtgctcccacccagccccttgccggcgcctgtagccagccccagacccttccaaccaggtggtggagccccgaccccagctccaagcatctttaaccggtcagccaggccctttaccccgggcctacaagggcagcggccaactaccacctcggttattttccggcctttagcccccaaaagggcgaacgacagcctggggggcctcagccccgccccaccccccttcttgtcttcgcaggggcccacccctctgcccagcttcacttcaggggttcccagccacgcgccagtctctggttcccccagcaccccacgctcctcgggccctgtgacagccaccagctccctgtacatcccagcccctagtcggcctgtcaccccaggtggagctccagagccccccgctcctcctagcgcagctgccatgacctccaccgcttctatcttcctatctgcgcctttgcgaccctctgcgcgcccagaggcgcctgccccaggcccaggggctcctgagccccccagcgctcgcgagcagcgcatctctgtgccagctgcccgcacgggtatcctgcaggaggcccggcgccgggggacccggaagcagatgttccggccgggaaaggaggagacgaagaactcgcccaaccccgagctgctatcgctggtacagaacctggatgaaaagcctcgggccgggggtgcagaatctggtcctgaagaagatgctctgagcctcggnnnnnnnnnnnnnnnnnnnnnnnnnnnnnnnnnnnnnnnnnnnnnnnnnnnnnnnnnnnnnnnnnnnnntaagaccccccctccaatggctcccaagaccccgccccctatgactcctaagactccacccccagtggctcctaagcccccatctcgagggctccttgatgggctcgtgaatggggcagcctcttcggctggaacccctgagccaccaaggctgcagggcaggggtggggagctgtttgctaagcggcagagccgtgcggacaggtatgtggtggaaggtacacctggtcctggtcttggccctcggcctagaagtccttctcctaccccgtctctgcccccttcctggaaatattcacccaacatccgtgccccgcctcctattgcttacaacccactgctctctccctttttcccccaggcggcccgaactctccctaaggcccaatcccaggggcctcgggcaacacccaagcagggcatcaaggctctagattttatgcggcatcagccctatcaacttaaaactgccatgttctgttttgatgaggttcccccgactcctggccctatcgcctcagggtcccccaaaactgcccgagtccaggagattcgccggttttccactccggcaccccagcccactgcagaacccctggctcccactgtgcttgccccccgagcagccactacactggatgagcccatctggagaacagaactggcctcagcccctgttcctagcccagcccctcctccagaggctcccaggggccttggggcttctcccagctcctgcggtttccaggtagccaggccccgattttcagccaccagaacaggattgcaagctcatgtgtggaggcctggggcagggcaccagtgaacaggcacaggtcccaggaccaaggagaggtggaacatccagttcctaaagttgcttctcctaccctatcccatcccctgtcacgcatctggaagctaaattgcctcctgccagagatggtttccaagttgatgtccccttcccccaccttcctcctcactctctacctccctgccgctttccaaccaagtatgtctgctttggtatctttgcctctctttgtctctgcatttcctttcctggatctctgtctttatttccaggcttctccacccatattcctccacagatctctcttccttgacatttgtgcttttctccctgggcctcattttaatgttcagtgagaagtaaacagagcagaagtgaccactgggacttcaggcaagaagctcaccaccaggcacacagcaaagggactgaactgacccctgtttgcactaagccacccccaccccccactctgctttcccaagcttgactggcatatacctaggcctgtgtgtgtgtgtgtgtgtgtgtgtgtgtgtgtgtgtgtgtgctcttccgtctaaggcatgaataagaggggaggtcaaaataaagacccaatctgaggccgggcacggtggctcacgccggtaatcccagcactttgggaggccgaggcgggcggatcacgaggtcaggagatcgagaccatcctggctaacacggtgaaaccccatttccactaaaaatacaaaaaattagctgggcgtggtggcgagcgcctgtagtcccagctactcgggaggctgaggcaggagaatggcatgaacctggaaggcggagcttgcagtgagctgagattgcgccactgcactccagcctgggcgacggagcgagactctgtctcaaaacaaacaaacaaacaaaagacccaatctgagtcttatcgttgtactgatagaagggtcagatatccccacatggagttgagtgggagaaagagattcactagagaataactccttagagaccaatgtctgtagcaggtgtacagcatcttgtgaaagttatggagcatgaaaagactgaagggccaggacagtttgcatgggctgagttataccagctagaccaggaatagaacgaagaattctatacctcaggatttcaaaaagttagcaacttgagaggccagtgctgagcaacccagtacccaggaaatgaaaaaaagaaagagagattccctgccgagatatgaacaaatcattggcttcattgcctcatgagcttgagagaaaggagaagagagccagagtgtggcaagtgaggccaaaatctagaagcatggcagaaatgagtgtaagtgattgagccacagacagaagtgtggcgaggctacaatgccatattgggtagtaaggtaaattgagttacaagaaacaccgtactgagagggggattggaaacaattgagaag

SEQ ID NO: 7402 - DNA, 824 bp, Homo sapiens
  misc_feature (593)..(593): n is a, c, g, or t
  misc_feature (596)..(596): n is a, c, g, or t
attgaagaattaagtttgagtttaagcccactcaccgcagggctggtttttgcatgtaatactcccatgatgtctggggaaatgacagtttctgttgaattataattctccggtttaagggtctccttcccctggtgtctgatggtgagaggtctgaagagcatttgtcagagtacattaggcattctcaacctacttcatgctttacgagagctgagaaatcagacgcaccggcctttattattatatatgctacatctgttgagtatttttaaaataccaataagaggacttgtttatttcataaaccacttcttccctctctttcaaagaaaatacattattaccatacttttacattagtctgagaatttttgctaaatatgattaagtattccaaaatataatggcgtcattattcttgacttttttagagaatatacatcttaagactgtattagttctcagagcaaggcatcatctactcccctgcacctgagagtctggccccagattccagatgtgcggacagcccatgaccgaggtgcacacagtgccctcttgaataggaaggtcagccagtgaggcggcanatnaacttgcaggatggacttatatcttaccatctcttcctgctaccaaaataaaaaaataaattgaaagacaagacccaccagtctagttttgtagacctgtgaaatgtgtctttatttcttggcattagaagaaagatatttttaatccatatcgtggttttagagttgaagtgaattgatacccaattttccatcttagatctcctttatcaaaaaaaaaaaaaaaaa

SEQ ID NO: 7403 - DNA, 501 bp, Homo sapiens; identical to SEQ ID NO: 3420

SEQ ID NO: 7404 - DNA, 597 bp, Homo sapiens
gcggccgcctactactactaaattcgcggcacgaggattcagcctccagagcaccagcactggcactggcactggcacacgctatggcaaatgaagtgcaagacctgctctcccctcggaaagggggacatcctcctgcagtaaaagctggaggaatgagaatttccaaaaaacaagaaattggcaccttggaaagacataccaaaaaaacaggattcgagaaaacaagtgccattgcaaatgttgccaaaatacagacactggatgccctgaatgacacacgggagaagcttaactataaatttccagcaacagtgcacatggcgcatcaaaaacccacacctgctctggaaaaggttgttccactgaaaaggatctacattattcagcagcctcgaaaatgttaagcctggatttaaaacacagccgtctggccagctgcctcgaatatctgacagcttagcaaaaagggccaaagctttccataggcgtgctgcacttgcttggtaaattaaacagcttttgtatcttcccctttgactttaggtaataaagcatccaaacttgtaaaaaaaaaaaaaaaaaaaaaaaaaatcg

SEQ ID NO: 7405 - DNA, 2531 bp, Homo sapiens
  misc_feature (283)..(297): n is a, c, g, or t
  misc_feature (1719)..(1719): n is a, c, g, or t
  misc_feature (1730)..(1730): n is a, c, g, or t
gatctcgtgagaaccaactcactaaaacaagaacaggatggggaaactgcccccatgattcaattatctccacctggtccctcccaggacacatggggattatgggaactacaagtcaagatgagatttgggtggagacacagccaaacgatatcagggtgttgtgaggattcatggagcaaatggctgtgaaagcaccttgtaaagggtagagcagtgtgcggcgtgagggattattatcattgttaagacgtctacgcctcgttgctcaccctgtgtgatnnnnnnnnnnnnnnncttttccctcctttctccctggtttccacgcctgggctgctgagtcaggcggaccggccaaggctggcgagggctgaacagatgctctgacatgtcaaggcaggaaatgacagttcccaggcagccctctgtttcaggtgtggaacaggctccgaacacactttgtgtgataaattctagtaacgccaggctgagctctacctccacccccttaggctgcaagactaggacatgaggctgaaagtcagagaagtccctgtgagacgagggccctgagcaagcactggccagactgtagcaaggccactcaccaggccaccccgctggttctacttccgcacccacctctggcagccatgatgcttctgcagcatgccagtttgttcactgagaccttcacagaagggtcgcaaaccaccctggacggtgagaaactaaggtgactgaggcaagtcattgaaccaccctgagccttggcttcctcatctatgaaatggagttgacagcatctgtcctgcctgtggtaaaaattgctgtgatcccacaaccaaaaggaaagagagaattatgagaaaaatatgtacttattctgtgaaaatatgtgagattttcatgagagacttcctgttccagtggactcttccaccgcccttgagtggggaacatccaggccttcacactcacgctcagcccatcacccctctgtgcaaggtgcaaggtcctctgcccacctgaagcctcaaggcctgatggaaaccatccacagccactctagtacctttgacaggagcgtgaccctgctggaggtgtgcgggagctggcctgagggcttcgggctgcggcacatgtcctccatggagcacacggaggagggcctccgggagcgacttgccgacgccatggccgagtcacctagccgggacgtcgtgggatccggaacagaacttcagcgagagggaagcatcgagactctgagtaacagctcaggctccaccagcggcagcataccaagaaactttgatggctaccgatctccgctgcccaccaatgagagccagcccctcagcctcttcccgactggcttcccgtaggtaccagcaacctgcttctgactggccagccccctcccctgctggaggaggggagaagccccgctctggtcctacccttcagtctctgctcttccttcatcaaccaccttccccaagcttagtgacagcagccgcccatcctacctggatggagaagagacccttctccaagcacctcagcgcacttgccctctgccacacctgtcggtggaggctgtggccaggagagactgtagaagctcggtccctgtgtatgtttgcatatgacatcctgcattggatccgcttttgtattttttaaccatacccacggtggggcgggtgggggganacctggaacangttcagatctgggggcctgagtggggacagagttgatcgtccacctggccattttgaccctgagtggacagtcacagcctcagctcatgtctggctgtgacacacactgcccccagcttcccttggtcagccccactccagcacggggtgaacggaggcccagagtactagggaaggaggaagggaggacatgcctcttcttcctcctttctttccccatctgttcctgggaagagtttgtctttcttatctttaagcccctttaccctggtcctgtactgatcagtgaaggaaaccgtggttactgaggccctgttgaaaagtgcacgtcttgtccaataaatcacgctgcagttggtgtcaaaaaaaaaaaaaaaaaaaaaaaaaaaaaaaaaaaaaaaaaaacccgggggactttttgggggggcgggaaaaaacgaggagacaacaaacaaggcgccaagtggcgcaaaacgggggtatacccgaccccaatatcactatggacacaagagggaggacaacactcacgcgggagaccccaataagggaagagcgcgattcaaactcccagacaaaaaccacagggataacccgcgggttataaagagaacaccgccgcacaaacaagacgagccaacaaagagaacagagaggaaaaagaagcagcgagaagaaaagacgacaacagagcgaagacacgacgagaaacacaaagaaggaaacacacaagaaaacaagaagacatgcagatcagagaaaaaacacgacaagacaacaaagacacacaccaacaaacaa

SEQ ID NO: 7406 - DNA, 524 bp, Homo sapiens
aaaacatttaacctagcctttcactaggtttcgagtaatacaaaatagagtagtataatatgatctatgctaaattcatcatttttaaagtagcctaagactattagctgttttgttggcagcctatacactgttaagttatgaagtgcactgttaagtacttagtatgaacgttgatgtcaaggtcttgggctacttttaattcatgccttgccctcgctctacttttacagtaactagctccaagtataggacaagtccaagtccgtctgtgcttgctccagtccagctactttttctaccctaccagtgtctttgtggacttgagttgattcattcactattcatatgcaactctgataaactaaccgtgtaaaaataaaacattggcctggaatctcaacactttgggaggccaaggcaggagaattgcttgaacctgggaggcagaggttgcagtgagctgatcacaccactgcactccaggctgggtgacaaagccagactctgtctcaaaaaaaaaa

SEQ ID NO: 7407 - DNA, 2396 bp, Homo sapiens
gtgaagatgaagattacttctcaaaaagtatccatatttccagtgttccttttaatcaaatatgccacttttaaataaataattacaaaatgtaaaattataaaatttttaaatttaaataataagtaacagtaaaattttttgacaatatatatgtcactgtctttgtaatttaaacatattgctgcctgggatatgggtaacagaattatcactcatggaactttgtagtagtgatggcttggtttgtaattcatcatttcatctttcttggtcttgattaatcctgaaatccttaaaatggctggcatggttatgactttattgtggtaaccttggagatataagccctcttacgatcaaaaacagaagaaaaaaatatattgttcaaactgatgccaggcctacctttattccctcccttaattactttttttctcattcagctcagatcatcctgcacttgaaaaatgaagttttaccaccatcaaaactatcattatttaacaacaagtgaagatcaacagaaaaattcaagtagctttgcaaatactagttgatactcagtgaaatcacgtcactattttgatgcctgaatccatacatttgtgatttatgtttaattacagaagcctattgccttgcagcaattttgttgttataatactgattaattggttactccttcttattataactcagtaatacctgtggtcatttggttcctctatcctgacaaagttcactggaaattgccctcagattttataaactgggggatttcttaattagataaaagttcattactgaagatggaatattatataagatggaggaagggtaattaatagacatgagatatagaaatactttgttagccctgctatagattgcctattgtagtctttctgtgcatttcaatagtctgtattaggaaattataacttcagcacttttgatagcaaaaattggcatctttcaattctgtatagtatgtgactatcctgtaaatgataatatgtgtacagactgagaaggcaggaatataaagtaattgaaatctctcattgccggtatactctaaaacatgcttgatgccttgtcagcatcattgcacacattgactctgtatttacatctgtatatacactatgattagaaaatatgcaagaaattgtttttccatgttaagaacaaatgccattagaagatgtccccttaattgtattgtcagagtattactatgtcaaggatgactgttctgttaacctaattttgtgttttcacatggaaatgtgattggactccatttttctgtgagttgagagtaagagcataagtcagtttgaaagcatttacaagtttgttttagaatgtagtaagggctgaaaggtgctctacttcttaacttgttttttccatgttgtagacaaatgaaatttgtctaaatgcttttgtctaaaaatgcatttgtctaaatgctttagattgatgtagggtttagatcctctttaatactttgagatagtcttattctgattttttttttcttctggaaaccaagtagaattagggatgggaatacaaatgcatttattctggcttctgttttattccaagaagcttcttggaacaaatcagtaggaattgaaaagaaagcatgaccaacccaattacaggggataaatgtaagcttgttaaagtaagcaccacaccatgtttctgtctccccagcacccagcacagtgctgtgaaccttggcagatgctagataaatgtgtgttgaatgaatgtgcctatgaagccacaaagatgccacatgttagtatatcagtgagaggtgactccacagtgctctctggagaagcaatatgagtgactgaagagtggggccttttgcttttgcctggatataggggtgctcttctactgtaattgggtgtggaaaaactctggctttatggtattccattaggttcttttcatttaaagtagtcttaaaatcaaagtatccaatattttaaagccacaaagtagattacataattagcagagattttagtcagtaaaatgttagaaatcaaactataagaaaattcaagtcctttattttgtgtcttgggtatatgtcattattttaaattccacactcccttatttaatcactttggtaagtgcctttgatgttttgaaatgtatagtgggagatgagcaaatgtaaatgtcatgtgccctgttccctagcttctcaattcctcataaccatttttaccagtgttgcaaagtttagacctttgtgttaatatcagaagtgtatttgtagcccctccatagtgaacaatgaaataaactatttcatagaaaacaaaaattaaaaaaaaaaaaaaaaaaaaaaa

SEQ ID NO: 7408 - DNA, 2131 bp, Homo sapiens
  misc_feature (49)..(99): n is a, c, g, or t
  misc_feature (1452)..(1469): n is a, c, g, or t
cctttgtcattctagctgcctgctgcctccgcagcgtccccccagctcnnnnnnnnnnnnnnnnnnnnnnnnnnnnnnnnnnnnnnnnnnnnnnnnnnnggattagttgggacctgccttggcgaccccatggcatcccccagaaccgtaactattgtggccctctcagtggccctgggactcttctttgttttcatggggactatcaagctgacccccaggctcagcaaggatgcctacagtgagatgaaacgtgcttacaagagctatgttcgagccctccctctgctgaagaaaatggggatcaattccattctcctccgaaaaagcattggtgcccttgaagtggcctgtggcatcgtcatgacccttgtgcctgggcgtcccaaagatgtggccaacttcttcctactgttgctggtgttggctgtgctcttcttccaccagctggtcggtgatcctctcaaacgctacgcccatgctctggtgtttggaatcctgctcacttgccgcctgctgattgctcgcaagcccgaagaccggtcttctgagaagaagcctttgccagggaatgctgaggagcaaccctccttatatgagaaggcccctcagggcaaagtgaaggtgtcatagaaaagtggaagtgcaaagagtggaccttccaggcagttgcgtccatgacaccaggaagatgtcagtgtgtgtttttcatttgatttatttatcttggggaaagtgaaaaatgtaatctgcaagttaatgaccctattggcttgtgtacatctatatgctaaaatgacttccccacattgacatttgtgcgccacctttaatcactctggggcaactctcacatcttgctgcatgtacatgtatacggctactattgaagtgtaattgtgagatggactccaacaagcatgtgactgtgagattgtgtgtgggaaaatgtatttaactactctgtgtgtgtgtgtgtgtgtgtgtgcgcacgcgcgcacgcgcacacactcacgcacacacaagcagagaaggcgctgatcttgaactaatcctgcacaggcatccttccctttatagattgattccagcaaaggcggaataaaacaaatttcctatgaagagaatcctgatatgaaacaagtcatgtagtctcatggccgggaatctctccacagatactaacaacttaaacttactactttaggagaaaaaaaaaaacattcaatttcggacactgagttatatatgaaattaattaggctctagtccaacagttgtttacattttaaatagtccatattgaatttaattaaaacaagggatgcatgcagtcaaattgatagtttaattcttcaagtgataatatggaagtttcaccttgcctttgtccaagccccacctattaaaaccctttactcacagtttgaaactgaagcagtaaacttgttnnnnnnnnnnnnnnnnnnattgtcttaagcccaaagttgcctcacttccactattctcagcagccaaccaggatttggcagctgctccactgttacggttgagggaacagggatcagccctgttagaagtctgtgagcctcaaactctacctgttctctgcaatcatccaaaatttgaaaaagaagctatatccagtgtttcactgccaaacagattcactactcttactgattcttcactgagctttgctagtataagcagagttccaagtctcccctagggttgtctctacatttctttatcattccagtgggtagggtttagctgggggaaggacatttcataagggttagttggactgagcagtatggacatttgcttttttcattacgtactgttgtttttccttgttaggtgtgctttggtggttttaatattattgtgccagggatggggaaatggggggggttgtgtgggaagagtacttattattgtgttttcttcagtgtaattgttcttggtaattgatacctctctgttttatttctctcattctttcaaaataaaactttttgaaatttggaggaaaaaaaaaaaaaagaataggagaaaaagagaagaggaagggaaggaagaaaaaaaaaaaagagaaaaaaggaggggggggcgaagaaaaagg

SEQ ID NO: 7409 - DNA, 2345 bp, Homo sapiens
  misc_feature (365)..(420): n is a, c, g, or t
  misc_feature (1362)..(1377): n is a, c, g, or t
attttagtggtggagtcaatttatttctgagacgatctcatttacctgaatgaggagctcatatttattttcaggatttatgaggaatccaagatgaatttggagcaggagaggccgtctgtctgcagtgccccaggctgctcccagcgcttcccaacagaggaccatctgatgattcataggcacaaacatgaaatgactttgaagtttccttcaataaagacagacaatatgttatcagatcaaactccgaccccaacgagattcctgaagaactgcgaggaggtgggcctcttcagcgagctggactgctccctggagcacgagttcaggaaggctcaggaagaggagagcagcaagcggannnnnnnnnnnnnnnnnnnnnnnnnnnnnnnnnnnnnnnnnnnnnnnnnnnnnnnncttagcagcgctcggctgcccaaccatgacaccaacgttgtgattcagcaagccatgccgtcgcctcagtccagctctgtcatcactcaggcaccttccaccaaccgccagatcgggcctgtcccaggctctctatcttctctgctacatctccacaacagacagagacagcccatgccagcctccatgcctgggaccctgcccaaccctacaatgccaggatcttccgccgtcttgatgccaatggagcgacaaatgtcagtgaactccagcatcatggggatcgaaggtccaaatctcagcaacccctgtgcttctccccaggtccagccaatgcattcagaagccaaaatgaggttgaaggctgcattgactcaccaccctgctgccatgtcaaatgggaacatgaacaccatgggacacatgatggagatgatgggctcccggcaggaccagacgccacaccatcacatgcactcgcacccgcatcagcaccagacactgccaccccatcacccttacccacaccagcaccagcacccagcacaccatcctcaccctcaaccccatcaccagcagaaccatccacatcaccactcccattcccaccttcatgcacacccagcacatcaccagacctcgccacatccgcccctgcacaccggcaaccaagcacaggtttcaccagcaacacaacagatgcagccaacccagacaatacagccaccccagcccacaggggggcgccggcgaagggtggtagacgaggatccggacgagaggcggcggaaatttctggaacggaaccgggcagctgccacccgctgcagacagaagaggaaggtctgggtgatgtcattggaaaagaaagcagaagaactcacccagacaaacatgcagcttcagaatgaagtgtctatgttgaaaaatgaggtggcccannnnnnnnnnnnnnnnttaacacataaagactgcccaataacagccatgcagaaagaatcacaaggatatctaagtccagagagtagccctcctgctagtcctgtcccagcttgctcccagcaacaagtcatccagcataataccatcactacttcctcatcggtcagcgaggtggtaggaagctccaccctcagccagctcaccactcacagaacagacctgaatccgattctttaaaatgcaccatcagacctggcctccaagaagagctgtagcgtaccatgcgtcctttcttttaagggcatttttagaattaactcagacctggaagactcctcagttcttcaaagactggctttcatttttatagttattatggaaatgttgtcttttatacttagttatataagaaaaagggagttatgcaattaatatctatcagcttgggaaacgctttggtgcttttctccagttttctggtaccagttacttgtttataaactgaaccttttctgtatatagccatggtttcattcttatcagtccaaccctttgcctgaaacattgaatcttgttaaaccacagcttttagctaaaatgaggtatacctagatgtcaagtaagacagatccaaggtaactgggtaggaaatcttttgacatcttaactcatgttgagtttgtgctgtggtgtcaccagaattccagataaacacacagcctttcccatacctttttttttcttactataaaatattataagatccattgatgtccaaataataccaccgagcatctcttcacctctcctcctcttggtccacttgctaatgcccagttttcttctccatttccactttttcttaggctccctatttactattcattttgacttccttctgttttatttttttccctttagcattgcatgtgaataagaaaataatgtttaaagaaacaacaaaaaacaagggggggcgcaaa

SEQ ID NO: 7410 - DNA, 2124 bp, Homo sapiens
  misc_feature (1808)..(1808): n is a, c, g, or t
  misc_feature (1822)..(1822): n is a, c, g, or t
  misc_feature (1828)..(1828): n is a, c, g, or t
  misc_feature (1835)..(1835): n is a, c, g, or t
  misc_feature (1845)..(1846): n is a, c, g, or t
  misc_feature (1849)..(1849): n is a, c, g, or t
  misc_feature (1865)..(1865): n is a, c, g, or t
  misc_feature (1871)..(1871): n is a, c, g, or t
  misc_feature (1911)..(1912): n is a, c, g, or t
  misc_feature (1921)..(1921): n is a, c, g, or t
  misc_feature (1923)..(1923): n is a, c, g, or t
  misc_feature (1929)..(1929): n is a, c, g, or t
  misc_feature (1933)..(1933): n is a, c, g, or t
  misc_feature (1947)..(1948): n is a, c, g, or t
  misc_feature (1958)..(1961): n is a, c, g, or t
  misc_feature (1968)..(1968): n is a, c, g, or t
  misc_feature (1977)..(1977): n is a, c, g, or t
  misc_feature (1995)..(1995): n is a, c, g, or t
  misc_feature (1997)..(1998): n is a, c, g, or t
  misc_feature (2002)..(2002): n is a, c, g, or t
  misc_feature (2015)..(2015): n is a, c, g, or t
  misc_feature (2018)..(2018): n is a, c, g, or t
  misc_feature (2022)..(2022): n is a, c, g, or t
  misc_feature (2034)..(2035): n is a, c, g, or t
  misc_feature (2043)..(2043): n is a, c, g, or t
  misc_feature (2045)..(2046): n is a, c, g, or t
  misc_feature (2050)..(2050): n is a, c, g, or t
  misc_feature (2055)..(2056): n is a, c, g, or t
  misc_feature (2061)..(2061): n is a, c, g, or t
  misc_feature (2067)..(2067): n is a, c, g, or t
  misc_feature (2107)..(2107): n is a, c, g, or t
  misc_feature (2110)..(2111): n is a, c, g, or t
  misc_feature (2115)..(2115): n is a, c, g, or t
  misc_feature (2117)..(2117): n is a, c, g, or t
aatttttgtatatttagtgcacgaggggttttcgccatgttggccaggctggtctcaaactcctggcctcaagtgatgcacctgcctcagccttccaaagtgctgggattacaggcatgagccaccgtgcccggccaaagtcagctttcaaaatccaagccataattggtgaggtgggagtttcagaattacatagaaaaattaatatttgaaaaaataattctgaaatttcgaatttaaaaacagatgtgctgcttctgggtgtaggtagtaaaagtataggaaaagaactgtttccttagaagcggactgtggaagggctatgtagaatgtcaaagggcaacaagagcctgtgtttttaatgtcatcctgtactcggcacaaatcaaaggccaatacaagtctgaaaagcagaaataaatatttttccaggtttttgcttgggcacatactaactgctttgggcattctaatctggtctccaaacaccaaagacccatttcgagcctgctattagcctgctgctgactctatcacttggagcaataatgtggggttatggtggtggaatcttgtatatttttgtcaaaaataaaaccttgagttaaggggatagatatagatggaaaaatacacaaataaatacggtatgaaaacacatggaaatgtgtctttgtcaaatatgaatcattattaccatcacaaaaattcttctcttggccaatatctcatttccctatatagtatacaagcaccatttcttctcaatttttaagaagagaaattagtccattaccacaggggttcttgtcactactaattatacaacaatcttttcccaacaaaaagatgtcctccacaacctttgttttcaaagcagacagcatctatgtggccaaatatactttgggttgttcttgaggatactggttttgggctgatgactatggtgggcagcatggatccattgggctccttctgctaaacagccacattgaaatggtttaaaagcaagtcagatcaggtgatttgtaaaattgtatttatctgtacatgtatgggcttttaattcccaccaagaaagagagaaattatctttttagttaaaaccaaatttcacttttcaaaatatcttccaacttatttattggttgtcactcaattgcctatatatatatatatatgtgtgtgtgtgtgtgcgcgtgagcgcacgtgtgtgtatgcgtgcgcatgtgtgtgtatgtgtattatcagacataggtttctaacttttagatagaagaggagcaacatctatgccaaatactgtgcattctacaatggtgctaatctcagacctaaatgatactccatttaatttaaaaaagagttttaaataattatctatgtgcctgtatttcccttttgagtgctgcacaacatgttaacatattagtgtaaaagcagatgaaacaaccacgtgttctaaagtctagggattgtgctataatccctatttagttcaaaattaaccagaattcttccatgtgaaatggaccaaactcatattattgttatgtaaatacagagttttaatgcagtatgacatcccacaggggaaaagaatgtctgtagtgggtgactgttatcaaatattttatagaatacaatgaacggtgaacagactggtaacttgtttgagttcccatgacagatttgagacttgtcaatagcaaatcatttttgtatttaaatttttgtactgatttgaaaaacatcattaaatatctttaaaagtaaaaaaaaaaaaaaaaaaaaaaaaaccccgnagggggggggcccngggtanccccaanttccgccctnnaanaggtggaggcccggtntttacnaattccactgggccggcccggttttaacaaaccggccggnnccctggggnanaccccngggnggtaccccaacttnnacccgccttnnnnggaaatnccccctttncgccaagctgggggaaananngganaggcccgccccgntcngccntcccaaaagttnncgcccctnanngggnatggnnaattntaccgngtaaattttggaaaaatcccgggaaattttggaaaccagnccnntttnanccaaggg

SEQ ID NO: 7411 - DNA, 8008 bp, Homo sapiens; identical to SEQ ID NO: 5717
  misc_feature (1012)..(1043): n is a, c, g, or t
  misc_feature (1240)..(1258): n is a, c, g, or t
  misc_feature (4512)..(4533): n is a, c, g, or t
  misc_feature (6057)..(6099): n is a, c, g, or t

SEQ ID NO: 7412 - DNA, 2906 bp, Homo sapiens
  misc_feature (198)..(227): n is a, c, g, or t
tcaaaaggacagatgcaggggacaggcgccaggcacagataccatctcccttccccaagccagctgcccccaaccctccccctgcccgcaattagtcctctggggcgggagcggggcacagagcagagccctcttgggggaggggaagcccgatccgcacccacccttcctttgcccccctcttccttctgctgctcnnnnnnnnnnnnnnnnnnnnnnnnnnnnnnccaatttgcacatccccactctcccggtccgtttcaccgccagacatcggttccatttcgaccctcactggcggtcattcccaccccctctgctggtcaatttcaccccttttggcggtcaagtgcagtcccccatttcccgggcaatttccccctcccctccttctccctctcccctcccctccccagcagtgtcactcccagctgctccccacctcccgcgctccgcgctcgctgcggccagtctcgggcgtcccggtcagtgtccagctgccgcggcctcggccccggcgactcccgcccccagccccccttccctccgcgggcagcggctccctccctccccagaacagctgaaggtctcagtcacctccgaggggagcgcagggggaggggaggggcgggggacgcggcggaggggaggtgggggagccttgacgctgctgcccgggacgcggcccggggctggtgggaacaggggcgtcctcctgcgcgcccccctccccagcgtcccacctcccgacggcggcggggaaagtctctccgaaagcgtgaagggggattggaggaggtttttatttccctttgtgcgggtggctggggccggatcgaggcggcgggagccgcgggactgggggctccccgctgagccgagaggagcgcgacaaaggatgcgtcccgccggggtcacagtctccgcggcccaactttgcgcgcggcgcccgcgcccctggggagcccgcccgctgcgctgagaacccaggcgtccgggctgggagaggggccgggagcgtccgcaggtggcgctggcccggatctcccgaccccaggaagggatcccggagcttcctggaggcggcgggcggccgtgtcgctccagggaaccgcgctgcccgcggaaactccgcgcgcctccgcggatgcccctcgccctagcccccagcgcgcggggttcggggccctgcgaggtccccccttcccccgcggtgcttcccaagctgggctaaggcgggcttctcttcctccctcctctgtcgcctccttttcctccccctcgttcaccttttccttccctctatccatccagagccccgccaaagggcgcacctgatctttctcatccttccctgctcttcccttcctctccacctcctcctcctccttggggaaaggggcccggagaagggcatgtgggggcccctctgacagtggcccgattggggtgacaggcgcccaaatggccaagtggctacgggactacctgagctttgggggtcggaggccccctccgcagccgcccaccccggactacaccgagagcgacatcctgagggcctaccgcgcgcagaagaacctggactttgaggacccctatgaggacgcggagagccgcttggagccggaccccgcgggccctggggactccaagaaccccggagatgccaagtatggttctcccaagcaccggctcatcaaggtggaggctgcggatatggccagagccaaggcccttctgggcggccccggggaggagctggaagccgacactgagtatttagacccctttgatgctcagcctcatcctgcacccccggatgatgggtacatggagccctacgatgcccaatgggtcatgagtgaacttcccggcagaggggtgcagctctatgacaccccttatgaggaacaggacccagagacagcagatggacccccttctgggcagaagcctcggcagagccggatgccccaggaagatgaacggccagcagatgagtatgatcagccctgggagtggaagaaagaccacatctccagggcgtttgcagtgcagtttgacagtccagagtgggagaggactccaggctcagccaaggagctccggagacctccgcccagaagcccccagcctgcggagcgtgtggacccagccctgcccctggagaaacagccgtggtttcatggccccctgaacagggcggatgcagagagcctcctgtccctctgcaaggaaggcagctacctagtgcggctcagtgagaccaacccccaggactgctccttgtctctcaggagcagccagggcttcctgcatctgaagttcgcgcggacccgtgagaaccaggtggtgctgggccaacacagcgggcccttccccagcgtgcccgagctcgtcctccactacagttcacgcccactgccggtgcagggtgccgagcatctggctctgctgtaccccgtggtcacgcagaccccctgacagtgaccctcggcccccttttgagtcctcgggcccagaatcgtatcccaaagccctcccatggcctagaaaataaataagttattgtttaaaaaaaaaaaaaaaaaaaaaaaaaaaaaaaaaaaaaaaaaaaaaaaaaaccccgggtcaggacaggggcccccggccattcgagggtcacatggccccaattcgtgttacaaagtgctcacactgagagaccccataaagagccgaaatacaatgacaaagcggttaccggatacacacgcggcagagggacatgcacaacacctacaccgccacgtgactacaacgaacacaaaaggagcgacagcacaacagcaagagcataaagcaacacaagataatcgatacaacacgtcaccgacgccacacgatgagacacaaggcacaga

SEQ ID NO: 7413 - DNA, 2024 bp, Homo sapiens
ttgctaggggcgctgtctcgtagctggtcctgctgctggtctgttcggcgtgtggtctggccgggcgttggtcttcgcgccgcgtctgtcggcgtcgtgcttgtctcgctcgtttgtcttctgttcttgtgttgtcttctctctttcggtgtgtgtttgtgtgcggtcgtgtcggtggctcgttgtcgttcctgtcgctgtgtgctctgtggtctctcttgcggcccgtgtgcggtgcgtggttcggtcgtgctcgctgctcgtctctcttcgtgcctgtgctctgggtctctgctgggagtcgtcgtgtcttgtactcctcgttgcctgattctctctctctccctcagccgtcctctccgctctcgtctgctgttgcgtcgcttctgctcttcttgttcttcgtctcgttgttcttgtctgtccgtgtgtctgtacgtggcgcggctctgcgcttcgttcgtcgtcgtcgactccttcctcctcgttcgtggctcttgctctgctgcctttcccgcgcctgcctaccctcgttccttccttggtgttctccgcgcctcggcgtgccgcgcgttctcacaccgtcctcgctcgtgtgtgcatcggtcctgcctggtcgctaggctcgttgcgtccgtccgctctctctgttacgccgtgatgtctgaggttcattgcactcgtgccttcttccgcgagttctgcttgcccgtgtgtgttgccggcgtcttgttggtgctgcggctgcgtccggtctgctcgctggtgccgtgtgtggcggtggtctggcgcggtccgcccgcgctagctggctgtcgtggcgctctcggtgcgggcgccgctgacgcttcgacgcttcgcatcttgccgggtgggcctccctgttcgctctttgctgcgggttgacgactggcgagtgttgtctgtgatgtgctggtccgcgttggtgctcagcgttgtgcgttgtcgtgtgtgtatagcatgtcagtggtgatgtgtgcttgctgacgaggaaaaattccgtaagcgaaaggcctaaattatcctcctgtgttaggagctacatcggtgaggttgcgcctttccgttcgcatgggctttctctgccaagttgggtttggcacatgtagggcggagccagtcagggaacttgtgtccctggcgcgtcttggcaggcctgtgccggctacctccgggaagatggctgttaaatggttctcagggttctcgatggcccctggggtcagcttctgtcctcggcctctcacctctgtggttccgttcgtgtcaggtagccattcagttgatgtttattgagcaactacagatgtcagcactgtgttaggtgctgggggccctgcgtgggaagataaagttcctccctcaaggactccccatccagctgggagacagacaactaactacactgcaccctgcggtttgcagggggctcctgcctggctccctgctccacacctcctctgtggctcaaggcttcctggatacctcacccccatcccacccataattcttacccagagcatggggttggggcggaaacctggagagagggacatagcccctcgccacggctagagaatctggtggtgtccaaaatgtctgtccaggtgtgggcaggtgggcaggcaccaaggccctctggacctttcatagcagcagaaaaggcagagcctggggcagggcagggccaggaatgctttggggacaccgaggggactgccccccacccccaccatggtgctattctggggctggggcagtcttttcctggcttgcctctggccagctcctggcctctggtagagtgagacttcagacgttctgatgccttccggatgtcatctctccctgccccaggaatggaagatgtgaggacttctaatttaaatgtgggactcggagggattttgtaaactgggggtatattttggggaaaataaatgtctttgtaaaaaaaaaaaaaaaaaaaaaaaaaaaaaaaaaaaaaaaaaaaaaaaaaaaaa

SEQ ID NO: 7414 - DNA, 1008 bp, Homo sapiens
gggtaaaacaaacatagggcggtatcccttggaaggccggggggcttatattgtgcggcagccgcggaagagtttctctgggggaccacactaacgagcgcttgcgcacgcgtggcccttcttttttacccggggcctccagaaagccccagggcccttgggggcccccgacctaccccagggggcatttaccagaccgggaggtgaaaagccggcggaacccggacacgggggcaggggtcaataaattcaaaaaagaaaggttaggagctttctctgtaacgtggggtttccaataattatggagttttaggaaaccctgaaataataaaaaggggaaaaaagctgtttcctataggtagtcggaatgcaaacttttgacgtcctgatgctccagggccctcttccaactcagtttcttgtttttctcttcctcctcctcctcttcttcctcctttctcttctcttccccagtggggagggatcactcaggaaaacaggaaaggaggttccagccccacccacctgcccaccccgccccaggcaccatcaggagcaggctagggggcaggcctgggcccagctccgggctggctttttgcagggcgcaggtggaggggacaggtctgccgatgggggtgggagcctgtctgctgggctgccaggcggcactactgcaaggggtgggagcctggctcgggtgtggctgagactctggacagaggctggggtcctcctgggggacagcacagtcagtggagagagccaggggctggaggtggggcccaccccagcctctggtcccagctctgctgctcacttgctgtgtggcctcaagcaggtcactggcctctctgggcctcagtctccacatctgtacaaatgggaacattaccccctgccctgcctacctcacagggctgttgtgaggaattgatgagatgatgtatgtgaaacactttgtaacctgtaaagcgctgtgcacacgtgaaaaaaaaaaaaaaaaaa

SEQ ID NO: 7415 - DNA, 779 bp, Homo sapiens
aatttttcaaatattgacctgccttacacaatatggaagactgatgcaaggatttctgaggaggagttatgtagatgggcctctttagatccagagtgaagatattagtgtcttgtatgaaagttcaccaaagggcattcatggtagacaaggcttccatgtgtcatctcgtgtaagaagaattgtaggtgttttaaccacgtccccagctagggtctcattgccagacgtgagtgagccttctgatgattatagctcccagtctttgagccctcccagctgatgcagaatgggacagagatgagctgtcccctccagctcctaccctaatggcagacttgtgagtcagataaataatgttccaagctactaagttttggagtggtttgctatgtagtagtgggtgacctgaacacttggctacttgccattgcgattgccaaatctgccattccctgatatggtgtatttcctgaggttacaagccagccacttggtgacaggttaattacgttggaccccttccatcatcaaagggatgccagtttttcctcactggaatagacatgcattctggatatctggatttattaatataatattaatactttccctgtctaatgcttttgctaacacaatcatccgtgaacccagaaacctttattcatggtattccgtgtaacattgcttctggcatacactatcagcctgagaaaatggaatgagctattgaggagtcagttgtggtgccagttgggagacctgaaaagttgaggttc

SEQ ID NO: 7416 - DNA, 2177 bp, Homo sapiens
ggtggcgcgtgaccggaggaggcgggagctcaggcacgacgccttctccttgcttctgggggtcgtggccttgctcccgctgtgcgggaaaagaatccaggcccttccacgcgcgtgtgggtgcgggggccccgaagtgctcgtggttccccgctaggtctccgctggggcaggaaccggaatcatgggtgggaccaccagcacccgccgggtcaccttcgaggcggacgagaatgagaacatcaccgtggtgaagggcatccggctttcggaaaatgtgattgatcgaatgaaggaatcctctccatctggttcgaagtctcagcggtattctggtgcttatggtgcctcagtttctgatgaagaattgaaaagaagagtagctgaggagctggcattggagcaagccaagaaagaatccgaagatcagaaacgactaaagcaagccaaagagctggaccgagagagggctgctgccaatgagcagttaaccagagccatccttcgggagaggatatgtagcgaggaggaacgcgctaaggcaaagcacctggctaggcagctggaagagaaagaccgagtgctaaagaagcaggatgcattctacaaagaacagctggctagactggaggagaggagctcagagttctacagagtcaccactgaacaatatcagaaagctgctgaagaggtggaagcaaagttcaagcgatatgagtctcatccagtctgtgctgatctgcaggccaaaattcttcagtgttaccgtgagaacacccaccagaccctcaaatgctccgctctggccacccagtatatgcactgtgtcaatcatgccaaacagagcatgcttgagaagggaggataaaaactttcagaatgagcaaaacaccatcaacgttaattccagagatggaacattttttttcctagtgagaaaacaacccatttgaagagaagaccactaatgagaagaccactaaagagagacatcaagaatggattcagcagaatcatttcaccgttttgaacacgccagccagttttgaagggccaaagccttgatcagggatcagtcattaaaggacactcttgagtattagtaaaccctcttatgatgattaaaagagaagggcagccctctccaccttttggtactttctattcaacttgcactgaccataaaatgtttctcttctgaacaagccccatcatttggtgaacctccaccctaacaaagtaggatggggttgggggctaaattaattggagtggggcgaggagagagccagaaaacatagatccgagggcagcagtgctgggtggagagagccagaaaacagatctggaggcagcagtgctggatggaattgtctaggctgtggcatgttggttttgtctttcttttctcctttgattatgtaagagctatttcattataacttattatggtgattatacaggcaagaagacaaaaaggagagaaaatgtacctcttctactggaataatgtttatgattacaagtgagataaggtatttttatcaatatgaaggcaaccttggctgataaaacctctatagtgaatactcacatctttacttcactcactatcaataataaatatattttctgacaaagaaaaaaaaaaaaaaaaaaaaaaaaaaaaaaaaaaaaaaaaaaaaaaaaaaaaaaaaaccaaggccgagcgtcggcgcctcgcaacgcacatgtcccccctccgatcgcccaaccatcccatccccacttccacgtatgacccaaacgggcggggcgccgccctacaaacgcccccgcggggggcccgcccctattccgcaccacccccacttctttctagaaaaagaagggccctccctgcggggccgtgacctcataaaacacccacggcgtccaggcgcccgcgcttattttcacatgcgcgtgagtgtggagtgaaccctctactgcctcagcagattactctttataatggcaaaaccctctttctttgcggcggcgtgacacctcattcagctcgcgaccttcctcagcaaccagtcacgtcccactaaacaccttccacggcgagcaacgcacaaacctgtgttttagcatcgcgcaccatgtcgcagtcgtaagagacacacccacggcagttttgctcgtccgttcat

SEQ ID NO: 7417 - DNA, 1985 bp, Homo sapiens
  misc_feature (5)..(5): n is a, c, g, or t
  misc_feature (371)..(397): n is a, c, g, or t
  misc_feature (1156)..(1566): n is a, c, g, or t
  misc_feature (1573)..(1604): n is a, c, g, or t
  misc_feature (1790)..(1804): n is a, c, g, or t
ggggngggcgggacttcctgcgcgggggcccgagccgctcagtctccctgctctccgtggtccccggctcgcgtgtagcggcggcggcggcgtctccgtgaggaggcgcgcggggccatgacgtcagcgtccacaaaggttcgacctccctcgcggacagcgctccctggcggccacgggagggcgggccccccacttggctcgcggctcttccgccccgggcggggggcgggcgggagccgagcctggggtggggctaggggctccgggcgggacggggagggcgggcgccggccccgccatgacgtcagcgtccacaaaggtcggagagatcttctcggcggccggcgccgccttcacgaagctcgggnnnnnnnnnnnnnnnnnnnnnnnnnnntggccgactcttctcctgcgggcgcgaagtggacggagacggaaatagagatgctgagggctgctgtgaagcgatttggggacgatcttaatcacatcagctgtgtcatcaaggaacggacagtggcccagataaaggccactgtgaaacgcaaggtatatgaagattctggcatcccccttccagctgagtcacccaagaaagggcccaagaaggtggcatctggtgtcttgtcacctcctccagctgcccctcctcccagcagctccagtgtccctgaggccgggggtccccccataaagaaacagaaggctgatgtgacactcagtgctctgaacgactccgatgccaacagtgacgtggtggatattgaagggctaggagaaactcctccagctaagaaactcaacttcgaccaggcctgaccctggattctggccttctcatgacctctgctgatcctcctctcctctcctgctgagccttccacctctgacctctcactgttcatgccggacctgtggatctcctgggactccgagcaaggcctgcacgagagagggctgaaaggctgctggggctgccacctcgctattcccgcataagcatctgcccccaacccctttgaccttcatctgatggacatttttatacagaaaacaataaagatttccctctcaaaaaaaaaaaaaaaaaaaaacaaataacaacaaaaacaaaaaaaaaaaggaaaaaaaaaaaaaaaaaaaacaccaacgnnnnnnnnnnnnnnnnnnnnnnnnnnnnnnnnnnnnnnnnnnnnnnnnnnnnnnnnnnnnnnnnnnnnnnnnnnnnnnnnnnnnnnnnnnnnnnnnnnnnnnnnnnnnnnnnnnnnnnnnnnnnnnnnnnnnnnnnnnnnnnnnnnnnnnnnnnnnnnnnnnnnnnnnnnnnnnnnnnnnnnnnnnnnnnnnnnnnnnnnnnnnnnnnnnnnnnnnnnnnnnnnnnnnnnnnnnnnnnnnnnnnnnnnnnnnnnnnnnnnnnnnnnnnnnnnnnnnnnnnnnnnnnnnnnnnnnnnnnnnnnnnnnnnnnnnnnnnnnnnnnnnnnnnnnnnnnnnnnnnnnnnnnnnnnnnnnnnnnnnnnnnnnnnnnnnnnnnnnnnnnnnnnnnnnnnnnnnnnnnnnnnnnnnnnnatggccnnnnnnnnnnnnnnnnnnnnnnnnnnnnnnnnccgggcgccaaagcttattggcacctcagggggcccccttataaatttccggaaaccccgaaactgtgaaaaagggggaaaaccagaggggcccttcgggctctcaaaaggtggcgcctgggaaaaccaaaccccgcttatagcccttaagggggcctctggggcgtttctctcacatgtgcggtnnnnnnnnnnnnnnnctctttggaccctttccgggtttaagggtgcgctctaaacaaatgttggcccataaaaccccccccccaccactgtggcccctgtttttttccaactttcgggaccctcctcgcctctgtgagtgcccttccccgcacaaaggccacgctttttttacgggtatttttcggctcttggccc

SEQ ID NO: 7418 - DNA, 521 bp, Homo sapiens
agtgttttttttttttttttttaaccagaaaacccactctcaggagttgtcacagccatagcaccttgaccacccaagtgaaactttgtactcggtatttatacagaaacataaattgcagcaaacattctactcaatatttctgccttccagtgccttgatccgatcctagtttttcccactactatcctgtcactactttttccatctcctgtagatcccgatgcccttcatcccttttagcgacaatgcattaggcaaaactctgctacccaacatttttatcttggacccacacacactaacacaaactgcccatccccttcccaggcccactccagtgctggctaccctttaaattatcttactgtgcaatcctaagtggttaataagtcaagtgatccctctacatgctcaactaaaatcaagacttcccaagaagaaaccgccttcctccttgctgtttcagaattattttttggccagcgatggtggcttatgcctataatgccaggtcgacc

SEQ ID NO: 7419 - DNA, 661 bp, Homo sapiens
tttttttttgactagagactttgtactgaccaaagtgtcactaagcctgaattaagtccttattatatatctaagtaaatgaatggctattaagaaacaagtcagtagcatatgaagctggcgattcccctattaagaatcccaaaggatttgttcttaagtttccagaagacatattacagaagatggctgaaaccagctagccgagctgatgtgattagtccctaatctgaagcattaaccttcctaaccagttaggggatgatttttagccagtgactccatttatagaacttttttttttttttgagacaaggtctcactctgttcccaggctggagtacagcacgaatgatcatagctcactgcagcctcaacccactgtagtcagtaacaactgcagtattctggccttctgagagtccctactaggtggttccgccatttgcttctagttctaaattttgcaatttttttctttgtattcctgctcattccctgtcatctctctccccaccccagaaagtgttacatggccaaagagtgaatcaacaaatattttttgagcccttaatacgtgctaggtaacatgctagctgccgtggacacagcagaggcacttgattcccttttccaggcatgcctttctttgacaatgtca

SEQ ID NO: 7420 - DNA, 8640 bp, Homo sapiens
  misc_feature (407)..(430): n is a, c, g, or t
  misc_feature (1850)..(1867): n is a, c, g, or t
ggggggacatggttacattaaagctaactcccgtcatctcaattatctccttggaagtagttttcacaaatataaaaacgccctacggtggctgttttcggtgatcatggaggaagcactttactcccaccaaatgtcacaaatgaatttccagaatatgggaccatggaggaaggtggagaaggcctaagggcttctctggaatttgatggtgaggctctgccatgccacccacaagagcagcagggtgtccagcctcttactggctgccactctgggctcgacagtgttacagaaggaccaaaagatgtcagagaggccccctctcaaagtcatctcaaggaacaaagtttacagcccattgactctttgatttcagctctgaaagccacagaagccagaatcannnnnnnnnnnnnnnnnnnnnnnnaggtactggaccaagatgctgtttctagtttttcagttcagcaggtggaaaaagagctggacactgccagtcgtaaaacacagagagtcaacaaactgctccctgctggccaaaaaaatttaccagaaatacctctttcagctgaagtaacaacggaggaaagtttttatttgagcatccagaaagatctcaccgcgctgttaactggagacactcaggcagagatttcccagataatgaataatgggaggaaaggggctgtctgtgtgcaggagccatcttgtcctttggcctccctcgggagctcagcagtgacctgccactctgcaggcagtgttggtttcttgaaagagcagaggtctgctcttgggagagagcacccagggggatgtgatcgaagcagctccatgggacgcccaggccgggtcaaacatgtggaatttcaaggagtggaaatactgtggacaggaggagacaagagagagacccagcatcctatagattttgagacatcactgcaaagaacagcctctcctgacagcaaagagtcttccaaagtgccacgccatctcatctcatcagctggtttgtgtaattcaagtagtttaactgagaatgtttgggatgaatcctggaaagctccttcagagaggcctggcactagctcggggacattttcccctgtgcgtcttgatgagagtggagaggatgaagtcttcctacaggaaaacaaacagcatcttgagaagacacctaaaccagagagagacagggaaaggatcagcgaacaagaggagcacgttaagggggaagatgaagacatccttgggcctggatatacggaggactccaccgacgtgtacagctcccagtttgaaaccattttggacaacacttctttatactacagtgcagagtccctggagacattatactcagagcctgatagctattttagctttgaaatgcccctcactccaatgatacaacagcgcattaaagaaggtggtcagttcttggagaggacatcagggggaggacatcaggatatcctgagtgtgtctgcagatggtggcatcgtgatgggctattctagtggcgtcaccaatgggctgaatgatgccagcgactccatctacacgaaaggcaccccggagattgctttctggggaagcaatgctggggtgaaaacaacacggctagaagctcattctgaaatggggagcactgaaattttggaaaaggagaccccagaaaatctcagtaatggtaccagcagcaatgtggaagcagccaaaaggttggccaaacgcctttatcagctggacagattcaaaagatcagatgttgcaaaacaccttggcaagaacaacgaatttagcaaactagttgcagaagaatatctgaagttttttgattnnnnnnnnnnnnnnnnnnatcagtcactcaggtatttctttaaagcattctctcttgtgggagaaactcaagaacgagagagagttttaatacacttctccaatagatatttttattgtaacccagataccattgcttcacaagatggagtccattgccttacctgtgcaataatgcttcttaataccgatctacatggccataatattggaaagaagatgacctgtcaggagttcattgcaaatctgcaaggggtaaatgagggtgttgatttctccaaggatctgctgaaagctctgtacaactcaatcaagaatgagaagcttgaatgggcagtagatgatgaagagaaaaaaaagtctcccccagaaagtactgaggagaaagctaacggaacacatccaaagaccatcagtcgtattggaagtactactaacccatttttggacattcctcatgatccaaatgctgctgtgtacaaaagtggattcttggctcggaaaattcatgcagatatggatggaaagaagactccaagaggaaaacgaggatggaaaaccttttatgctgtactgaagggaacagttctttacttgcaaaaggatgaatacaagccagaaaaggccttgtctgaagaggacttgaaaaacgctgtgagtgtgcaccacgcattggcatccaaggccacggactatgagaagaaaccaaacgtgtttaaacttaaaactgccgactggagggtcttgctttttcaaactcagagcccagaggaaatgcaagggtggataaacaaaatcaattgtgtggcagctgtattttctgcaccaccatttccagcagcaatcggctctcagaagaagtttagccgcccacttctgcctgccactacaacaaaactgtctcaggaggagcaactgaagtcacatgaaagtaagctgaagcagatcaccaccgagctggccgagcaccgctcatatccccccgacaagaaggtcaaagccaaggacgtcgatgagtacaaactgaaagaccactatctggagtttgagaaaacccgctatgaaatgtatgtcagcattctcaaggaaggaggcaaagagctactgagtaacgatgaaagcgaggctgcaggactgaagaagtcgcactcgagtccttcgctgaacccggatacttctccaatcactgccaaagtcaagcgtaacgtgtcagagaggaaggatcaccgacctgaaacaccaagcattaagcaaaaagttacttagagtccatctgcggccaggaagtgctggtcatggagcaaaatagggtttttcaagatctttctggtaatccgtgaatatatttaaaaaaaaaaaaagtctgtgacaaaacggtgcattagtaattttttctattgtatatttttgttagtttctgtacagattgtctttgctcttgatttcttttgctttgatgatttttgcaacttgatagctaatgcaccttttctgtgaggaggaggggatcgtgatttcagaatgaattatgtatcccttctcttttggttttctcttgtttgcagtctgctcagttgttttatgtattctcatatcaactgttaaacttttttttaaggttaaagaatttaatccattgtgaaacacttaactggacaaactgtagttttagtaaattctagctggagttaatatacgcctttatatgtgaaatcttgcccagtcacagaggtagaattgagcactcacagatgctccagtaagaatcacagtgctgggaatctagttgctccaatatgaggcagcttcatgtgcagcttagcacttgttgttgagatcggaccctgctggaagcagggaaaagaagcgtgaagatcgtaggattgagaacttagggaagcacattagcttgcttgaagtgctgattccatttcagccaagcaagggaaagaggaagtggagtcattttgcctttgaaggctgaggaaagattgatacccagttaattttgtttgctaaaggatgggggcaataatcggcccttgaggagctgcagcagtaggcatgtgctcagtctgcaggaattgttacctcactcccacagggtctagactagaaatccatcatctctatcgttgatatccttccatccaggaatagatttttcttactctacatatgtgtgtgtgcgtgcgtgtgtgtgcgtgtgtgggcatggggttgtgtcctggttgtgatattgaggtcttccttcctaacaaattaatactaaaatgaaacagcttttcttgtgtccttaagacaaaataaggaaggaaaacgtagctgcagttgtccacgatggatattggttctttaaaatatatctgaaagtagtagtcagaatgaattatggttggaaaactgaggaatcttctggttgcaggtgcaaagtgactttgtttattcttgtctcagtctccttgatagccacttcactctgctactactcaactttctcctaaaaatacttcatctattttcagtcctttctttctgtctactcaaaatggttctattaactttgcagtcatgagcttgttccagttacagtccctttgaagttcagggtgataaacagaatattcttctgtagaggaagggaaaggagtgaaagtttagcccactgagacctagagctttgtgatttcctaaccttgaaactctgtaatccctaaagttaaaatctccgcaagtggcacaacttcagaactaatagtatcactttgatttttctttttcctcccttagaaagtttctctagttctatagtttatttgttgaaggtactatgaccaaagaatcagctgctctacaggaatagcatggttccagtgaattagagaaaacctgctgtaaagccatggtagtgtctaagtggtatgttattatgatgtactagcatttatttacagaattatttattaacgtttacttccttcccctctgtaaatgtccatgactattgcccagagaaggcttacccctctctagggttgcagttgctttctttgtaataagtattttgccacacctgtaaaaaaaaaaaaacctcacttttaactctctgccttgtttgggtaaaggcagtaactaagtttatgtttcagaactgcaaaacaaacaggatagttaccaatatggcccatgtgtcagattgattttcgtagcctctcactgaatccaacatatccacaagcaagttatctgtctttctacctgataatctaaattatcaggatatttgttttctgcctaaatgtttatactaagccgaggggagagaggtacctagaccatgtcatctacgagcttcagtaactaaagaaaaaggaacttccctgagtggcttgaatgtgtttgcccacagtctatatctatgtatatagaatgtctgtatgtattttacttatttaatatacattgaatggtagcttgctacagtatttctgacatttagagtagtgttgaaatactcggctagcatcagcaccactatagcactgtccgtgtcatatgagtcactaatattaactccagggacttctggataggctaatagatcattggatacgaagggctcttttgaagcttcagtataccatgtttgcatagtttatctttaaaaacaactttaaaggttcttttgtgagccaggatctcagactgccgtagcatgatgctgtccatctttagcgcatgggctgagaacacctcttccctgaggcttctgaaggttgctgtctgtcatgagtgcatgaaggaggccaagagtttatgctatgggaggaaccagtcactgatttgcctagattctgagagtctggcccatagccaaccacattttcctttgggataatttatttcctgtggcatctaaccagaagaaattgaggatgtttcctttcacagctgctccaagcctgttgcccaattcacggtacaagggagcaccccttccctttcctctgaaggtacgccacccacctccgtcgcccacctcagcgcccaggagccttgggacttccttccatatgataaatcattcttcttcacgtcaatacacttcatattaatttctagtacagaaaatcttgacagctatcagaatgccttggtcatagtgttgttgcaaaattgaccatacaggtggcccatgtataaaatctgaattttaggggtttgtccccacctcgcatgctggcttttacagggaggtgtctgggattcctcattagcaatcaaaacttaaattactgggatgcagagtccttactttatcgccagcccgtaggcatttctgaagtgcacttttttgaaacatcattttgctaactctcagcagtgtctaattaaactgagcaatacttttgtgaattttaattaatctcagcaaaaccatgatgggagagagtcctctgatggaaatgtagtccctggattatgtgtaacctttttattgctcttagatgcagaggatagaaagcattttttggtgcagtggtcttgtggcaaacacaagaccctctatgcgtctccaactgttatcctaatctagaaaatgaggactggcccctgggcaaaagtgacatgaggaatttactctggaagaggaaaatctgggtggctttccaaggctaagataggtttgtatttcaccctgtggccaagctacagaacttctgagattgtggaagaatttttgcaaccagcagggaaagaggcctcttactgcctaaacacaaagttacactgagcttttctactgtcctttgcctattgctccctctatcatgtaaagatctgggaaggatgagaggcagggcctgcttgtcatgagctgcactcttttctttttaactaatcattgacaattggaagaaaattgacgttaaagaagtttctccattgtcttactaacaaaaccttttgggtttcattaattgtccttgaaattgagttcctttggcatttttccttgcagtcatcagttaagcatgttgcatcctgaattcacagaagtttagctttgcaggtttgaatctctgtaatttaactcccgtggacttggtcgagttttcagcaggttgggagccacctctcttcatttcagcagtgagtcatcccttgacttttcaaatgacagaattttttccaattgtaaaattagcactgtaaaacaaagaaccaaagtggcatcctaagagttgttaaacctgaagtctagtttatgaggaattgtccaagttggagtttaaatagtatctgcttttgtctcaaagcatctaagttattctgacagaaaatggtaagtcagctttgcaggcagatgcgcctctgggcctcctaccttgctccacagctttctggccatcttgtctccccaggcccatgcccactgctctgcccacatgtcagcaaatttctttccaccagtcttatagcatcttacatgatcaaatcatcacagaataaccccgtgatagattattgatagcaatagagaggggcggctttgtcactgatttttctctcagattccttttccatctctcatccataaaggaaggactgaaatccaaaggcattctccttttgtacctacagtatccagaacccacgtgggcagccttctgcttatgacaataattggcccattgcatgcagagagaatgtcttcatagagagaatgtcattaaatacttgaatctgcatgacagtttgacttgaatgcaacagcaggaaaattttgcaagttacataattgtatatacagtaggttttcttaagtctcttcggttcatcctttgtaatttgtgtgtgtatctgtagtattgcaggcttttggagactattcttacaggcagtatgtcagtcatcaaagaaaatgctgtcacctgccattgttgtatttgtgggtatttatagttgtatgtatgtaaatgcatcagtgtgtagattgcatatcagtgtatggtacatgtacatcaaaattatttttgtccttaatcagtgtgatatgaaaagcaagtacaacctcataggactgattatataatgaagttgttgagagtatatatagtggtattgttttattaaacttaaactcaaataatattttgattaaaatttttaataagactttatgctagaaaattctttgagctttgaatcaccagggcaaaaatgactttcaactaaccttgtgaatcttttgcagtgtactgtgtgcaataccaagggcatagctccctgtaatttgggaaatacaaaaaaaaaagaaaaaaaaaaaagggcagccggtgcagtcttcgtaactttagtattaagagcacttaaagtcaaactggacaattttggggcttattacaaaatgtgatgctttaaagcacacgttctttattgttgttgtaattagtccataaaaaatatagctttcggaagaattaaatacccaccatatcatttatgtatttgtgtatgttttacgggagatcaaaccactctcgtggtgccgcatccgtactcgcttgacttggaagaaatatcacaagcactaaagtatatcagggcatcccaggattgggtactgtatcctaggtttgcagttgcagaaattagcatctagtgtcacaggtaaaagaatttcaggaccaggtttaaactttattttaaatatttttatacttaggtctctttttcctgcctctcccgtgattaagagccactggccttagttgtttgagcttactg

SEQ ID NO: 7421 - DNA, 3987 bp, Homo sapiens; identical to SEQ ID NO: 5804

SEQ ID NO: 7422 - DNA, 930 bp, Homo sapiens
  misc_feature (835)..(849): n is a, c, g, or t
ctcactccacacccagactgtttcctgactaaattccgtacctacttacagaccctctcagcttgctgacacccccctgtctgtgggactccctattccctagagccagggactgatgcgtccccacagacaaggacttggctcgctggagctctgctgagccgagagaggagggggtagaaaacattcacacttcctatgctctgtcagcaggacagggagcaaaaacgtccccaggcaacgccctcgcctctgggactttctgcctgtcctaaggcctccccaggtaccaaccccggacctatacggggttgtttggcactgtggattctcaagggcctagaacccttgcctctgaaactggtccgctggtgcagccctgctgtctgcagctcctgcccatacccccagcccacaccaggccaggcccactccgggctcaccaccctctgcagccttgtggggctctcccagcccctccagaagcccaccccacttctcgccaacccccgatctctaaatgaggcctgagcgtcaccctagttctgcccctttttagctgtgtagacttggacgagacatttgacttccctttctccttgtctataaaatgtggacagtggacgtctgtcacccaagagagttgtgggagacaagatcacagctatgagcacctcgcacggtgtccaggatgcacagcacaatccatgatgcgttttctccccttacgcactttgaaacccatgctagaaaagtgaatacatctgactgtgctccactccaacctccagcctggatgtccctgtctgggccctttttctgttttttattttannnnnnnnnnnnnnngcaccaaatacattttaattcaccgaaagcaaaaaaaaaaaaaaaaactgaaaaaaaacaaaaaaaaaaaacaaaaaaaaa

SEQ ID NO: 7423 - DNA, 1303 bp, Homo sapiens
tcactctgtacagcaaatggtttcttcccatttgctagacagagggctagattttccccgcccactctcgactcttcaggtagttcgcccctccccgtgaccggtgggtggtttctccctcctccccgcctcgggagctggatggtctcgcctctccctccccccaccccgtgccgggtgcgcggcctgggagtcagcggcccgagcgggaagcgccgggcgagcccactgtgcggccgtcgtgggggaagcgaaggttcctgattccacctacctcctaagtgaaggcttccgtccctggagaggaggcggcgccctgtatcggccttcgtcctccgcgggagctgcggcgccaagatgagtggagaggagaacccagccagcaagcccacgccggtgcaggacgtacagggcgacgggcgctggatgtccctgcaccatcggttcgtggctgacagcaaagataaggaacccgaagtcgtcttcatcggggactccttggtccagctcatgcaccagtgcgagatctggcgcgagctcttctctcctctgcatgcacttaactttggcattggtggtgacggcacacagcatgtactgtggcggctggagaatggggagctggaacacatccggcccaagattgtggtggtctgggtgggcaccaacaaccacggacacacagcagagcaggtgactggtggcatcaaggccattgtgcaactggtgaatgagcgacagccccaggcccgggttgtggtgctgggcctgcttccgcgaggccaacatcccaacccacttcgggagaagaaccgacaggtgaacgagctggtacgggcggcactggctggccaccctcgggcccacttcctagatgccgaccctggctttgtgcactcagatggcaccatcagccatcatgacatgtatgattacctgcatctgagccgcctgggctacacacctgtttgccgggctctgcactccctgcttctgcgtctgctggcccaagaccagggccaaggtgctcccctgctggagcccgcaccctaagcatcctgctgccttcccacaacattaaactctccttcctcagaaaaaaaaaaaaaaaaaaaaaaaaaaagcgggcggctcccaagagaaatccccctcgaggggggcccaagacttaacccccgtccccccgctttttctttggatcaaagtaggggccccttattgtgagaggcccataatttataacctggggccctgtggccgccttttttttaccacatctcctttgagactggggaaaaaatct

SEQ ID NO: 7424 - DNA, 3655 bp, Homo sapiens
  misc_feature (3654)..(3654): n is a, c, g, or t
acgcggcgctcgcgctccctccttaaatgagcctgggcgccccgcgcccgccacttcagtggatcccgcgccggggccgcgggcggagctgcctgccggtcccgcgccgcgcgtccgcactcctcggccctcgggcggtcgatgggacggggcgccgcggagcaggaggcggcgcccgtcggggtgctcgggccgcgcgggagcccactgtggggctcgggcatggcgggccgcaggacctgagctctcctcaggggagcggggaggcagctgctggccggcgatggggacggagtggggccgtcgccgccgcgccgagccgtgagcgccgagccaccgccgccgctacctcagcccttcgcgaagcgccgggcagctcgggaacatggccctggagcggctctgctcggtcctcaaagtgttgttaataacagtactggtagtggaagggattgccgtggcccaaaaaacccaagatggacaaaatattggaatcaagcatattcctgcaacccagtgtggcatttgggttcgaaccagcaatggaggtcattttgcttcgccaaattatcctgactcatatccaccaaacaaggagtgtatctacattttggaagctgctccacgtcaaagaatagagttgacctttgatgaacattattatatagaaccatcatttgagtgtcggtttgatcacttggaagttcgagatgggccatttggtttctctcctcttatagatcgttactgtggcgtgaaaagccctccattaattagatcaacagggagattcatgtggattaagtttagttctgatgaagagcttgaaggactgggatttcgagcaaaatattcatttattccagatccagactttacttacctaggaggtattttaaatcccattccagattgtcagttcgagctctcgggagctgatggaatagtgcgctctagtcaggtagaacaagaggagaaaacaaaaccaggccaagccgttgattgcatctggaccattaaagccactccaaaagctaagatttatttgaggttcctagattatcaaatggagcactcaaatgaatgcaagagaaacttcgttgcagtctatgatggaagcagttctattgaaaacctgaaggccaagttttgcagcactgtggccaatgatgtaatgcttaaaacaggaattggagtgattcgaatgtgggcagatgaaggtagtcggcttagcaggtttcgaatgctctttacttcctttgtggagcctccctgcacaagcagcactttcttttgccatagcaacatgtgcatcaataattctttagtctgtaatggtgtccaaaattgtgcatacccttgggatgaaaatcattgtaaagaaaagaaaaaagcaggagtatttgaacaaatcactaagactcatggaacaattattggcattacttcagggattgtcttggtccttctcattatttctattttagtacaagtgaaacagcctcgaaaaaaggtcatggcttgcaaaaccgcttttaataaaaccgggttccaagaagtgtttgatcctcctcattatgaactgttttcactaagggacaaagagatttctgcagacctggcagacttgtcggaagaattggacaactaccagaagatgcggcgctcctccaccgcctcccgctgcatccacgaccaccactgtgggtcgcaggcctccagcgtcaaacaaagcaggaccaacctcagttccatggaacttcctttccgaaatgactttgcacaaccacagccaatgaaaacatttaatagcaccttcaagaaaagtagttacactttcaaacagggacatgagtgccctgagcaggccctggaagaccgagtaatggaggagattccctgtgaaatttatgtcagggggcgagaagattctgcacaagcatccatatccattgacttctaatcttctgctaatggtgatgtgaattcttagggtgtgtacgtacgcagcctccagggcaccatactgtttccagcagccaacccttttctcccatcacaactacgaagaccttgatttaccgttaacctattgtatggtgatgtttttattctctcaggcagtctatatatgttaaaccaatcaaggaacttactctattcagtggaaacaataatcatctctattgcttggtgtcatttataggaagcactgccagttaaagagcattagaagaggtggttggatggagccaggctcaggctgcctcttcgttttagcaacaagaagactgctcttgactgataacagctctgtcaatattttgatgccacaataaacttgatttttctttacattccttttatttttcctttctctaaatttaatttgttttataagcctatcgttttaccatttcattttcttacataagtacaagtggttaatgtaccacatacttcagtataggcatttgttcttgagtgtgtcaaaatacagctagttactgtgccaattaagacccagttgtatttcacccatctgtttcttcttggctaatctctgtacttctgccttttaattactgggcccttattccttattttctgtgagaaataatagatgatatgatttattacctttcaattatatttttctcagttatactagaaaatttcataatcctgggatatatgtaccattgtcagctatgactaaaaatttgaaaaagataaaaatttctagcaagcctttgaagtttaccaagtatagtcacattcagtgacagcccattcattccagtaaagaatcatttcattcactttgggagaggcctataattacatttatttgcaatgtttctcttcgctagattgttacatagctcccattctgttggttttgcttacagcatatggtaaccaaggttagatgccagttaaaattccttagaaattggatgagccttgagattgcttcttaactgggacatgacatttttctagctcttatcaagaataacaacttccacttttttttaaactgcacttttgactttttttatggtataaaaacaataatttataaacataaaagctcattgtgttttttagacttttgatattatttgatactgtacaaactttattaaatcaagatgaaagacctacaggacagattcctttcagtgttcacatcagtggctttgtatgcaaatatgctgtgttggacctggacgctataacttattgtaaagaccttggaaatgtggacataagctctttctttccttttgttactgtatttagtttgtgataaatttttcactgtgtgatatttatgctctaaatcactacacaaatcccatattaaaatatacattgtacctgaccctttaatcatgttatttatgccaccaaggttgtggatcttaaggtatgtatggaaaggaactcatttatcaaattgtaagtaatacagacatgccatttaaaagaggtaaattcttgttttctatattttgttagtaaattctcaatgaaataagttgaagtttcactggatttcattaacttttaaatattacatatatgtgttttctcagattagtgaaaattgtgaccttaaatttaatacacatatactgcctcagna

SEQ ID NO: 7425 - DNA, 1270 bp, Homo sapiens
gaattctttcgattggcggtacagacacttttaagcgtgggtaaaagcaaaagcaacagctcaagcagcctccttggagaaaacctgaaaattcaacttgttcaagagaaggtcttgtacgtgcctaagttctagagcctcctgacgtgagcatggctgagagtgaggaccgctccctgaggatcgttctggtagggaaaactggaagtgggaaaagtgcaacagcgaacaccatccttggagaggaaatctttgattctagaattgctgcccaagctgttaccaagaactgtcaaaaagcatcccgggaatggcaggggagagaccttcttgttgtagacactccagggctctttgacaccaaggagagcctggacaccacctgcaaggaaatcagccgctgcatcatctcctcctgcccagggccccatgctattgtcctagttctgctgctgggccgctacacagaggaggagcagaaaaccgttgcattgatcaaggctgtctttgggaagtcagccatgaagcacatggtcatcttgttcactcgcaaagaagagttggagggccagagcttccatgacttcatagcagatgcggatgtgggcctaaaaagcatcgtcaaggagtgcgggaaccgctgctgtgcctttagcaacagcaagaaaaccagtaaggcagagaaggaaagtcaagtgcaggagttggtggagctgatagagaaaatggtgcagtgcaacgaaggggcttacttttctgatgacatatacaaggacacagaggaaaggctgaaacaacgggaagaggttttgaggaaaatctacactgaccaattaaatgaagaaattaaactagtagaagaggataagcataaatcagaggaagaaaaggagaaagaaattaaattactaaaattaaaatatgatgaaaaaataaaaaatataagggaagaagctgagagaaatatatttaaagatgtttttaataggatttggaagatgctttcagaaatatggcataggtttttgtcgaaatgtaagttttattcttcctaatttactgtgatttgttaatggatgaattgtattttgcaaagatagttagagaaatacctccttccccttagctttattaaggtatcattgataaataaaaataaaatatgtttaatgtatataatgtgatttttaaatatatatatatatatacacacattgtgaaataatgaaataaaggtaattaacacatctaaaacaaaaaaaaaaaaaaa

SEQ ID NO: 7426 - DNA, 2720 bp, Homo sapiens
ggacttgggaggcgcggtgaggagtcaggcttaaaacttgttggaggggagtaaccagcctgctcctctcgctctcctcctcgtctgcgccgcgtttcagagagaaaattcctgttccaagagaaaataaggcaacatcaatgaaggagagaagagccagccagaaattatccagcaaatctatcatggatcctaatcagaacgtgaaatgcaagatagttgtggtgggagacagtcagtgtggaaaaactgcgctgctccatgtcttcgccaaggactgcttccccgagaattacgttcctacagtgtttgagaattacacggccagttttgaaatcgacacacaaagaatagagttgagcctgtgggacacttcgggttctccttactatgacaatgtccgccccctctcttaccctgattcggatgctgtgctgatttgctttgacatcagtagaccagagaccctggacagtgtcctcaaaaagtggaaaggtgaaatccaggaattttgtccaaataccaaaatgctcttggtcggctgcaagtctgatctgcggacagatgttagtacattagtagagctctccaatcacaggcagacgccagtgtcctatgaccagggggcaaatatggccaaacagattggagcagctacttatatcgaatgctcagctttacagtcggaaaatagcgtcagagacatttttcacgttgccaccttggcatgtgtaaataagacaaataaaaacgttaagcggaacaaatcacagagagccacaaagcggatttcacacatgcctagcagaccagaactctcggcagttgctacggacttacgaaaggacaaagcgaagagctgcactgtgatgtgaatctttcattatctttaatgaagacaaaggaatctagtgtaaaaaacaacagcaaacaaaaaggtgaagtctaaatgaagtgcacagccaaagtcatgtataccagaggcttaggaggcgtttgagaggatactcatctttttggaatcctgaccttaggttcggcatgtagaccaagtgatgagaagtgaatacatggaagagtttttaagtgtgacttgaaaaatatgccaaaaaatgagagatacaaatgagctagaggaagatgaggggggatgcgagtacctccaagaagaaaaatcacactctgaatggtgcttgcatttttgggttttttttttttttgttataatctattcatggatctccactttgatttaatttttaaatgttttaatctcctttacaaaaagtatacgttaatataccgtcctcaagggggaactggcactgtgaccttagcatttagttttctagaggatgtgatctaatttctttctagctcatcattaaaaaggaaattgtatcaggacccatgggatatatccagaggcaaactttatgaggctttgaaatcttgccttcctgaagatagctgagtaggatggttctaaggaaagcctttgcaatcttgcaagatttgtagaccagcactacaaagatcgcatagatcaaataggaaaaaaaatgtcgatttttattcagtctgatggttctgttcttcattgtgattgtcattaaaaagtggtaaattgctcaatgtaatatttttgtgcgctgtttagaagttgtgtgattttttgccatcgttgataaaaatgcaaagtcaaataaaaggtgtcttggtttgatgtcatagaatgatccaaggagagaaaaaaggtagttactgttttcaccagaaaaggtaatgagtgaaggaaagaatagtagcagaaagcacagtttgtgagtaaagctgtctggaattaagttaccaaaaatacaaagcaaaaggactattattttgggttgaagctccaaaactgacagcatctgataatctgttggtttatttcacttttcattaaatgaacattgatgagagaagatgccacttacccaagctttagagaatccctagtggaagattatatgataaactttcagtcctgacataacactagggcatttctagagtgtcattgctaaaacctcactgaacagacgcagccaaggtctgtgttcagcacttggtctctgttgttacgtaaaataataagcatttaaaatagtttacagatatttttgaccagttccttttagagattcttccagagaagaaaccagatctgacctgtttattgttggcgcttgttgaaaaacggctttctttcccatgatagtgcttcgtttttgaagtgttgaagctgtgctccccttaaatcgtggcaggagagattaaggtaattacaacactcagttctatgtcttacaagcactttgtcttgtctctgcaagaaaattcgattccagtcatttcccataaaatacagacattttaccaacataatatgctttgattgatgcagcattatgctttgggcagtattacaaaatagctggcgagtgctttctgtatttaaatattgtaaaaagaaaataagttataactgttataaagcagaacttttgttgcattttttaaactgttgaagtcactgtgtatgtttgtttggtcaatgtttccgcagtatttattaaaacatacttttttttttcttcaaataaaaaagtaaccatgtctttgtctaaaaaaaaaaaaaaaaaaaacaaaacaacaaaaaaacacaccaaaacaaccgg

SEQ ID NO: 7427 - DNA, 514 bp, Homo sapiens; identical to SEQ ID NO: 3445

SEQ ID NO: 7428 - DNA, 1213 bp, Homo sapiens
  misc_feature (900)..(917): n is a, c, g, or t
gttgtcgcgtttttttttttttttttttttttccaatacaactctttcacttttatggctaacacaactaggtatctccagggccacatcacacaaattcggccaaggtcaaagtctgagtgaggtccggcctcagtcctaggtgcaacatctgtcttagctcctggagtccctgaccctctctctcaagcggagaagaggaggaggtctcagctgtccaggctcatgagtagagcagtgcccctcttgatccaatgatcaggtgtcatggccccagaccgcaggtcaatgccgatgacaaaggaggctcggtctgagctgcctgcccggttgggatagtaatagcaggggcaggagtacatgcccttggcgctcttcttgcggctctctgcaggccggaagtggatcgtgggcatgaggcagacaagctgcatgggctctgcctccaccaagcaggagttcttccggtcccagccagcaccttccaggtacaggccccggacccagacaccatccttggggggatacactaggttgctgtcatccacagtggaaacgataaactcccaggagaggctgtccactgaaacgttgttttggcgagctgaagactgcagcacagcagtgaggaagccagtgggaaaggtgaaaccagacaaccagaagatcacaggaggccgggcccggctggcccacagctcaaactgctccacacgcatggccaagtcccgggtccaggcagccaatggcttttgtgaggggtatgcctttccccagagcggaggaacatgggcatcaaagatgcaattgaaaatctcttccaggcttgtagacatgacgatgagaccctggatgcctttctctaggtctgtcagtgagaacaggatggtctgcatcagnnnnnnnnnnnnnnnnnntctcctgcagaaggaccacattgaggggggaggggtcgagagctagcagtttttgagtcccctcatagtcgatcatttcagggatcttctgcttcacatcagcggccaactcaaggaccttctcttcccgggtctggcctccagccctggtgggtgtaatctgaggttgcaaggaaagcaaagtatcaaagagggtttgtgcctcagtgatctgagaggccacatcagcattggggtgctggccaaaggcctcaggggggtccatgccaggcaataagctgatgtattccttgtaa

SEQ ID NO: 7429 - DNA, 824 bp, Homo sapiens
ctactgtcattctataacaacctagaagggtatattcttgctgaacgagaacatcaagaagacaggaaggaagctgaagatatctctgtcaagtcatcctctgtgtctgtcatgtgtcccacatgtgtagtcctaaatgccactgtctcacagttggcctcttatcaggacctaagccctgtggagacagcaacttgcagagccccattccaggggcagcaaggggtgggcaagatggaatcactcagcttaaggaaggtcttccccatctatgcttttgaagaaggaagaagtgggactatcattcactagtctaatcttactgctaaaattagactgagtgctccatctccaaacctggagggccatggtgtggtgtgtgtcacacaagccaaaagttgttcttcccaaggtctgggcagtggaagcagtataaacactgatgaataaactcatctgaattttaaaaagatgaagaaaattgttcctgtcccctggtggaacttttcaagtgacattgacaaataaacctctcaaaacctgtagaaccaattttttttttacaacacttttttattcccttttctatgtcctccttttcctcctccttcatcttctatttcttttctctctttcctttcctctcttttttttcttccaacttttattttaggttcagggagtatatgggcaggaatatcacatgggtaaattgtgtgttgctggggtttgatgtacaaatgatttcaccaggtagtgagcgtagtacttgaacattcacattttaataattcatgggaaagctgcaaatgtctatgatatta

SEQ ID NO: 7430 - DNA, 4222 bp, Homo sapiens
  misc_feature (2438)..(2503): n is a, c, g, or t
agcggagtcccagcggccgccagacccgccggagttggccatccagacgccgcggagcccggaccctccctcggacgctctgccccggccatggcgtcgctgctgccactgctctgtctctgtgtcgtcgctgcgcacctggcgggggcccgagacgccacccccaccgaggagccaatggcgactgcactgggcctggaaagacggtccgtgtacaccggccagccctcaccagccctggaggactgggaagaggccagcgagtggacgtcctggttcaacgtggaccaccccggaggcgacggcgacttcgagagcctggctgccatccgcttctactacgggccagcgcgcgtgtgcccgcgaccgctggcgctggaagcgcgcaccacggactgggccctgccgtccgccgtcggcgagcgcgtgcacttgaaccccacgcgcggcttctggtgcctcaaccgcgagcaaccgcgtggccgccgctgctccaactaccacgtgcgcttccgctgcccactagaagcctcgtggggcgcgtggggcccgtggggtccctgctcggggagctgtgggccaggccgtcgcttgcgccgccgccactgcccaagccccgctggggatgcgtgtcccgggcgtcctctggaggcgcagaagtgcgtgcggcctcggtgtccagggtgcagccttgacacctgtgaatgcccggaccacatcctcctgggctcggtggtcaccccatctgggcaaccactgctaggagccagggtctccctgcgagaccagcctggcactgtggccaccagcgatgctcacggaaccttccgggtgcctggtgtctgtgctgacagccgcgccaacatcagggcccagatggatggcttctctgcaggggaggcccaggcccaggccaacggatccatctctgtggtcaccatcatccttgataagttggagaagccgtacctggtgaaacaccctgagtcccgagtgcgagaggctggccagaatgtgactttctgctgcaaagcctccgggacccccatgcccaagaaatactcctggttccacaatgggaccctgctggacaggcgagctcatgggtacggggcccacctggagctgcggggactgcgcccagaccaggctggcatctaccactgcaaggcatggaatgaggcgggtgccgtgcgctcgggcactgcccggctcactgtacttgccccaggccagccagcctgcgacccccggccccgagagtacctgatcaagctccctgaggactgtggtcagccaggtagtggccctgcctacctggatgtgggcctctgtcccgacacccgctgccccagcctggcaggctccagcccccgctgcggggacgccagctcccgctgctgctctgtgcgccgtctggagagaagggagattcactgccctggctacgtcctcccagtgaaggtggtggcagagtgtggctgccagaagtgtctgccccctcgggggctggtccggggccgtgttgtggctgctgactccggggagccgctacgcttcgccaggattctgctgggccaggagcccatcggcttgaggccgcctaccagggcgactttaccattgaggtgccgccctccacccagcggctggtggtgacttttgtggaccccagcggtgagttcatggacgctgtccgggtcttgccttttgatcctcgaggtgccggcgtgtaccacgaggtcaaggccatgcggaagaaagccccggtcattttacataccagccagagcaacacgatccccctgggcgagctggaagatgaggcgcccctgggcgagctggtcctgccttctggcgctttccgcagagccgacggcaaaccctactcggggcctgtggaggcccgggtgacgttcgtggacccccgagacctcacctcggcggcgtctgcccccagtgacctgcgcttcgtggacagcgacggcgagctggctccactgcgcacctacggcatgttctccgtggacctccgtgcgcccggctccgcggagcagctgcaggtggggccggtggccgtgcgggtggccgccagccagatccacatgccaggccacgtggaggccctcaagctgtggtcgctgaaccccgagaccggcttgtgggaggaggagagcggcttccggcgcgaggggtcctcgggcccccgggtgcgccgggaggagcgcgtcttcctggtgggcaacgtggagatccgggagcggcgcctgttcaatctggacgtgcctgagcgccgccgctgcttcgtgaaggtgcgcgcctacgccaacgacaagttcacccccagcgagcaggtggagggcgtggtggtcacgctggtcaatctggagcccgcccccggcttctccgccaacccccgtgcctggggccgctttgannnnnnnnnnnnnnnnnnnnnnnnnnnnnnnnnnnnnnnnnnnnnnnnnnnnnnnnnnnnnnnnnnctacaccgccctggtcaccgccaccctgggcggcgaggagctggagccggccccttccttgccccgcccactcccggccaccgtgggcgtcacccagccctacctggacaggctggggtaccgtcggacggaccacgacgatcccgccttcaagcgtaacggcttccgcatcaacctcgccaagcccaggccaggtgaccccgccgaggccaatgggcctgtgtacccgtggcgcagcctgcgggaatgccagggggccccggtgactgccagccacttccgcttcgccagggtggaggcggacaagtacgagtacaacgtggtccccttccgagagggcacacctgcctcctggactggcgatctcctggcctggtggcccaacccgcaggagttccgggcctgcttcctcaaggtgaagatccagggtccccaggagtatatggtccgctcccacaacgcagggggcagccacccacgcacccgcggccagctctacggacttcgggatgcccggagtgtgcgagaccccgagcgtccgggcacctcggcagcctgcgtggagttcaagtgcagcgggatgctgttcgaccagcggcaggtggacaggacgctggtgaccattatgccccagggcagctgccggcgcgtggccgtcaacggactccttcgggattacctgacccggcaccccccaccggtgcccgcggaggacccagctgccttctccatgctggcccccctagaccctctgggccacaactatggcgtctacactgtcactgaccagagcccacgcttggccaaggagatcgccattggccgctgctttgatggttcctctgacggcttctccagagagatgaaggctgatgccggcacagccgtcaccttccagtgccgggagccaccggccggacgacccagcctcttccagaggctgctggagtccccggcgacagcacttggtgacatccgcagggagatgagcgaggcggcgcaggcacaggcccgggcctcaggtcccctccgcacccgccggggtagggtccggcagtgacctgggcaggggcctcgctttcccacctccctccagactcctttgaccccaggaagttttgcccctccttcttctccagacagccccctccccaggtgtctgggtcccctttcccgcccctttccagaactcagagtcagacaagaacccagagcatccgatggtagaaacaccaggaagacaattgttgctgtgtggtatggaatggagtttgcggtgactctggggccagcacccaggggacgacgttcaaccctagcctgaagggacccgctcccagctcagaagccgtctctgacttctcgtgcgtattttgaccctgatttcaatcttctacccttgggagttctggcgtttggcacaaagtcccctctgcctgtttggagctcagtgctagaccaggtcccctgccccgagctttgtttttggggttatttattgaaacaaagtgtggggagctggttgtgggtgtgagtgggggtgtggggtccaggctgggcccagtgaaaaggaggaaggggttcccatgcgggggaggctctggggctgaggggaacaattctcacgtgtttggtgcttagagacctgcccggggcgttgggcaggccctccgggggctgaattaaaaatgctttatttccaaaaaaaaaaaaaaaaaa

SEQ ID NO: 7431 - DNA, 455 bp, Homo sapiens
ttctatttctatttctttttttttcctctttttttttttttcaagccgcaggacgattttctggttcccggggatcagaaccagcggccaggcggttctatgccgcttggcaccgctttcattttatttcagatgaagacgttgagcttagtcagaaggggcataaatcaggacaattagcattggcgccaagaagatcctctaataccaatttcgcccgggtttccttcgcgcattcctccactcaagtcagaaatgtcactgcacatagcactgatggcagtgagacgcgacgcacccaaagtccgtttgatgaaatatacatggcccacgacgcttctggattgcggctcccggactccccgcccccaccagcggctcccggccgggaccctgctccgagcgggcagcgagctcctggcaaacttaggggccagtgccaattaaagagtgag

SEQ ID NO: 7432 - DNA, 713 bp, Homo sapiens
atggtcgactacctagcaaataagcccaagggtcagaattctttggctttacacaaagtcatcatggtgggcagtggtggcgtgggcaagtcagctctgactctacagttcatgtacgatgagtttgtggaggactatgagcctaccaaagcagacagctatcggaagaaggtagtgctagatggggaggaagtccagatcgatatcttagatacagctgggcaggaggactacgctgcaattagagacaactacttccgaagtggggaggggttcctctgtgttttctctattacagaaatggaatcctttgcagctacagctgacttcagggagcagattttaagagtaaaagaagatgagaatgttccatttctactggttggtaacaaatcagatttagaagataaaagacaggtttctgtagaagaggcaaaaaacagagctgagcagtggaatgttaactacgtggaaacatctgctaaaacacgagctaatgttgacaaggtattttttgatttaatgagagaaattcgagcgagaaagatggaagacagcaaagaaaagaatggaaaaaagaagaggaaaagtttagccaagagaatcagagaaagatgctgcgttttataatcaaagcccaaactcctttcttatcttgaccatactaataaatataatttataagcattgccaaaaaaaaataaagtgactga

SEQ ID NO: 7433 - DNA, 1085 bp, Homo sapiens
cggatgagggacgggacgtcgcagcgcgcgaggcggaagagccatgcattatagctgtgttagactcgtggcctcggagtgggagtgtcagtgcacttgttggcgagttcggttacgaagctctgattgaggagggggtgagtctgcatctccgtttgccgcgagtggtgggaggtaagtgaggtgttgcgcaggcggggcggggggtggagcggagagacaccgcgggcgggcgtcgtggtctggttgcacagctgtatccggtctaggttgattttgtgtggggatgtcccagtatcgggtgtgtgcaggctggggcgcgctgggcgcacgcgtggtgtgcaggggtcgcggtgcggctctgtgggggcgatctcgaggggagcgtatgcggggggtggaaggaacgaggccgggcgtgtggggtcaatttgtacagggggggcatgtgcgcggggtgcgcgtgggggggatagtgggtggtcgtatcgctcgtcggggtgggtgtgagacggtcgtaaatgagcggggtggtaagggggggaggggtggtgtattcggatgcgtcgggcagccgtggctggcaaatggggattgggcgggtacgctgttgggtggtgggtttgggaacaccccacccccacttctcccccaaaaccagagccacctgccagcctcgctgggcagggctggccgtagccagaccccaagctggcccactggtcccctctctggctctgtgggtccctgggctctggacaagcactgggggacgtgcccccagagccacccacttctcatcccaaacccagtttccctgccccctgacgctgctgattcgggctgtggcctccacgtatttatgcagtacagtctgcctgacgccagccctgcctctgggccctgggggctgggctgtagaagagttgttggggaaggagggagctgaggagggggcatctcccaacttctcccttttggaccctgccgaagctccctgcctttaataaactggccaagtgtggaaaaaaaaaaaaaaaaaaaaaaaaaaaaaaaaagaaatagtgaagaattagaaaaaaaag

SEQ ID NO: 7434 - DNA, 3003 bp, Homo sapiens
tttccaaggaaggaaaggcacacaatggtatcaaatgttcattcattccatctcttgatgctctacgatattatcagtctacactatgctttcctgaaaggccagaagttcaaagatggactagtttcccagggacctgattccccagttggaatactccagccccttggaaattcccgggatttataaaataactctagacaacaagactttgtctttaaaggtcctatgaattcttttctctctgtatttaggtatcctgatttttcttttccatattttccacaggattattttacaaatgcaaatagagagttgaaaaaagatgctcagcaagattaccatctagaatatgccatggaaaatagcacacacacaataattgaatttaccagagagctgcatacatgtgacataaatgacaagagtataacggatagcactgtgagagtgatctgggcctaccaccatgaagatgcaggagaagctggtcccaagtaccatgactccaataggggcaccaagagtttgcggttattgaatcctgagaaaactagtgtgctatctacagccttaccatactttgatctggtaaatcaggacgtccccatcccaaacaaagatacaacatattggtgccaaatgtttaagattcctgtgttccaagaaaagcatcatgtaataaaggttgagccagtgatacagagaggccatgagagtctggtgcaccacatcctgctctatcagtgcagcaacaactttaacgacagcgttctggagtccggccacgagtgctatcaccccaacatgcccgatgcattcctcacctgtgaaactgtgatttttgcctgggctattggtggagagggcttttcttatccacctcatgttggattatcccttggcactccattagatccgcattatgtgctcctagaagtccattatgataatcccacttatgaggaaggcttaatagataattctggactgaggttattttacacaatggatataaggaaatatgatgctggggtgattgaggctggcctctgggtgagcctcttccataccatccctccagggatgcctgagttccagtctgagggtcactgcactttggagtgcctggaagaggctctggaagccgaaaagccaagtggaattcatgtgtttgctgttcttctccatgctcacctggctggcagaggcatcaggctgcgtcattttcgaaaagggaaggaaatgaaattacttgcctatgatgatgattttgacttcaatttccaggagtttcagtatctaaaggaagaacaaacaatcttaccaggagataacctaattactgagtgtcgctacaacacgaaagatagagctgagatgacttggggaggactaagcaccaggagtgaaatgtgtctctcataccttctttattacccaagaattaatcttactcgatgtgcaagtattccagacattatggaacaacttcagttcattggggttaaggagatctacagaccagtcacgacctggcctttcattatcaaaagtctcaagcaatataaaaacctttctttcatggatgctatgaataagtttaaatggactaaaaaggaaggtctctccttcaacaagctggtcctcagcctgccagtgaatgtgagatgttccaagacagacaatgctgagtggtcgattcaaggaatgacagcattacctccagatatagaaagaccctataaagcagaacctttggtgtgtggcacgtcttcttcctcttccctgcacagagatttctccatcaacttgcttgtttgccttctgctactcagctgcacgctgagcaccaagagcttgtgatcaaaattctgttggacttgacaatgttttctatgatctgaacctgtcatttgaagtacaggttaaagactgtgtccactttgggcatgaagagtgtggagacttttcttccccattttccctccctcctttttcctttccatgttacatgagagacatcaatcaggttctcttctctttcttagaaatatctgatgttatatatacatggtcaataaaataaaactggcctgacttaagataaccattttaaaaaattgggctgtcatgtgggaataaaagaattctttctttcctactacattctgttttatttaaatactcattgttgctatttcactttttgacttgacttttatatttctttaaaaaattccttccttttaaaaaatataaaagggactactgttcattccagttttcttcttctttgttgttcttctagtgtgacttttcaagtgtaacagccattcttcctgactttaatattgtccagttctggtcttttctgtgaattaccactgggccccttacctcaatgctttttgttgatgcccactctggttcccttgtttatctgagtctgttggtaccccaaatgaccccacacccatcttaaagtactttttttcaccttccctgtttagtactggccagatgagttttttctagagctctgtcactatctgaaaagaaagaggctatgggaaacatagaaatggtatgtattaataactgatcataggctgaggagaaaaaatgtagctggctgcaaacccagtgctgtgaggtgacttatatgaggttccagatcaaagacaggccgtgtgagccagtccaggagggtgtaagttctgaatggttccttgctgactttgggtgacacatgtaccacatactggctcagtttaagtcatggttctattgtagatttatttttatattagttaataaatgactttaaattgtcaccaattgaaaatcttgtcactcttttggttttctttatatagctcagccaaatcttgttttatgtcctgtcctcatctcttaagctaaatctgtttggatcatattaataaactaaatgaaattacaaaaaaaaaaaaaaaaaaaaaaattggggggggccggtct

SEQ ID NO: 7435 - DNA, 2174 bp, Homo sapiens
gctaaacccctgtgaatgttcttctaaccttcctgttccccaccccctctctcagatttgacctagaattcccagcccaaatccataatttcttagctctaatacgaattttcatgttggacaaaaacctagctacaaatgggtttctatggaacttctaattaatgtgcaaaatacatattttctccaggttaagaaattttaagtcagatcatgctgacacaataagaaaatttgtttgtgtaattcattgacctcttccttccaaaataacatcaagtagccacctcagtgtgacaatatccagtcaatagtagagaatttaatccttggtcctataaaagaataaaattcattgtcgtatttatagcacgtaagccttgagtaacaggtcttaatgttagtgttggtgttgtggtttctgcggaacgtttacaagtgaagttggattctcctgggctttaaatccaaaaagtcttaatgaccgcttcatgtagttcccctcttattcccctgtggtctcctcagagccagcgtgtgctgggaaagagtattagtcatagcctggctttatagaatccaggaggtccttttagctgaaacaagtggcttcaaaagggaacatgaaacagtgaaaagatagccaaaggtcagtgaaaccacagcatttctttctaatctggctgaggccatgggggggaatgaggggaaaatatgcttccgggccaaggtcaccgagggggaccttgggatttgtgtcctccccagtgcttagagtagagatacctgcaaattcatggcaaacagttggaagaattacttgactgaaacaacccaatcttactttctttcgtaagttgaacctctgatttattgtggggttcaggctctcctcaatagaaggccagagttggacaggtggactaaggtcaaggatgaggagtctgcagtggggactaccacagcaaactgccttccttccgtggagtcctaactcagccatgtggtccactcacccaggggcccgggggctcagacaaaccccatggggaacatgctgccatgctctgtctttcttgtaaacgtagttgggtagggatcccaagggtatttgctctctccaaatgcagaacttccatccactttatctggtgatctgatgaacagcatggggacgtggaggtgaaataagcatctttcagaataaggtttttttttttttcctcttccagaaccaaaggctttagacatttgtagaactttctggattccttctgaatcgggttttaacataaaaaaccatcaacacatcatgggaaaggagctctttcatgatatacatcacatgtttcttgctctcattgaggaaatgtgttgtacaaaagcaccaaataagggcaccctggaagtgacatgtgtgtttcttctaagtcgtttttagtgcatcccctgcgattgcatgatgctcatgtggcttttagggaaaggcagaatgtgctagaagtcgaagtcattcaatattcagtgcttactgttactttgaaccaggtaatctcagttctttattcagtccttcccaaagaccttacaaaggagatgtgtaaactgatagattttgagcctaataagtcacagaaatggaaaattttagagcagtttgtttcacttaggtgagaactgattactttaaattaccaacatgtgcaaattctacttagtattcattattagatgctaagctggaaaagatgagaaacccaaggagaactattgaattaccacataattgtaatattatgctttaattttgtatgggcagtgttctatcagactaagcttctagcctttgaaatgatttacatgaggagagagcctgtatatctgacttgggaaacattaagcagaccctattttcactggcgcggtaataactatttatttgctatcctagaggtgctgggaatgagcctacgtgcgactttgatgagatatattcacatttggtgttggaacgaccacatagcaaagtgttggtttttttttattgtaacactctgtgtaaacgttgacaccttattaaatattaaatgtctgaactctatttttaaaaataaaacaagcacagagtctgcaacaaacatgttaaaaaaaaaaaaaaaaaaaaaaaaaaaaaa

SEQ ID NO: 7436 - DNA, 577 bp, Homo sapiens
aatgattccagtaagatgccttgttaatgactcaacaacatgtcgttcattttttatatcccgaacaaatgggtgttgaagcatgtttgcagaagtaggacgaaacaggaaattttttatcgtacacttttccatgaaattgtggaacttacgggaccatccgctggatttgactgtgggagcagattcccgcaaaataacgaagagagcttccaagggttgaaggttacacagaggaggggctccttcagccatttcaatggcagtaattcccacagaccacacatcacttctgtaatcataggagcgtcttgggtcctcatcacagtcaatcacctcaggtgccatccagtatggtgtcccaatgaaactattccttcttccattagttctgctcacctgggcactcactccaaaatcaaccagttttaacttcagcattatgagtcagaagcacattctgacctttgatgtcccggtgaattactcggtgtgcgtgaaggtgagctaagccctgaaggatttctcggcagatataagcaatccaatcttcttttaaactctgattactgtcatt

SEQ ID NO: 7437 - DNA, 482 bp, Homo sapiens
tttaagcagggggaagctcttctggtacttgctgtgtctgattcaaagatggaaaggatttggtgactgcggaagcctttgccttgcacttgtcccacagcaattacgctggaaggggtcctagacttgtggggtgtgggatgtgggataaatttggagaaagaccacagtatgtaaacaaaacctgccggttttccaaaatacctaaccacaagacttcacattttggcagctagaaagagtcaaatatgctttattctgagaacaaattttattctcagcggggagaaatatgaatcccagttcaagcaagaaactaccaataaccaaaattaaaggaatttcgaaatatagcctctgtagaaaaacctagcaagcccacatagtgagacaatattaatcaagaaactgatgacatcagtagaatccttgaagtgtgtgtagatgttcaaaatccttcaggctaaaatctatggaagaag

SEQ ID NO: 7438 - DNA, 2326 bp, Homo sapiens
  misc_feature (2206)..(2220): n is a, c, g, or t
atgggctccgggcgccgggcgctgtccgcggtgccggccgtgctgctggtcctcacgctgccggggctgcccgtctgggcacagaacgacacggagcccatcgtgctggagggcaagtgtctggtggtgtgcgactcgaacccggccacggactccaagggctcctcttcctccccgctggggatatcggtccgggcggccaactccaaggtcgccttctcggcggtgcggagcaccaaccacgagccatccgagatgagcaacaagacgcgcatcatttacttcgatcagatcctggtgaatgtgggtaattttttcacattggagtctgtctttgtagcaccaagaaaaggaatttacagtttcagttttcacgtgattaaagtctaccagagccaaactatccaggttaacttgatgttaaatggaaaaccagtaatatctgcctttgcgggggacaaagatgttactcgtgaagctgccacgaatggtgtcctgctctacctagataaagaggataaggtttacctaaaactggagaaaggtaatttggttggaggctggcagtattccacgttttctggctttctggtgttccccctataggattcaatttctccatgatgttcatccaggtgagggatgacccactcctgagttattggaagatcattttttcatcattggattgatgtcttttattggtttctcatgggtggatatggattctaaggattctagcctgtctgaaccaatacaaaatttcacagattatttgtgtgtgtctgtttcagtatatttggattgggactctaagcagataatacctatgcttaaatgtaacagtcaaaagctgtctgcaagacttattctgaatttcatttcctgggattactgaattagttacagatgtggaattttatttgtttagttttaaaagactggcaaccaggtctaaggattagaaaactctaaagttctgacttcaatcaacggttagtgtgatactgccaaagaactgtatactgtgttaatatattgattatatttgtttttattcctttggaattagtttgtttggttcttgtaaaaaacttggattttttttttcagtaactggtattatgttttctcttaaaataaggtaatgaatggcttgcccacaaatttaccttgactacgatatcatcgacatgacttctctcaaaaaaaaagaatgcttcatagttgtattttaattgtatatgtgaaagagtcatattttccaagttatattttctaagaagaagaatagatcataaatctgacaaggaaaaagttgcttacccaaaatctaagtgctcaatccctgagcctcagcaaaacagttcccctccgagggaaatcttatactttattgctcaactttaattaaaatgattgataataaccactttattaaaaacctaaggttttttttttttccgtagacatgaccactttattaactggtggtgggatgctgttgtttctaattatacctatttttcaaggcttctgttgtatttgaagtatcatctggttttgccttaactctttaaattgtatatatttatctgtttagctaatattaaattcaaatatcccatatctaaatttagtgcaatatcttgtcttttgtataggtcatatgaattcataaaattatttatgtctgttatagaataaagattaatatatgttaaatgaattgtttttttctttccgttttggaaatatgtattctacattatttatttcctcttactttgtctcttcttaaccctttcttccttctttgctccttttttctttctttcttccttcttcccttcctttcatcctttcatcctctcatttcttttttcctgaagtctaagaaaagctttctgaattttcaggtagtgtcctctgagctgatataggaaatctttactgtgtttaatttgtccaaatgtaggaattgcgagcttgccaaaagagaatcaatgaacttagtaaactcttctttcaaaagggctgattgttaaaaagttaagtttagaagatcccctaaaatatcaggaggatgctcaatgtatgaatgagtggtgatgagtttaagaccaatattttcatactgaaaactttgaaggaaaagttctgccccttttttcaaccctaaaagacaaaccgaggatcgccggcnnnnnnnnnnnnnnngaattattattacccctgcccttatttggagatttggttcaatttccctggtcctttagcccattaaaacaatttttgggggggtggggggcaggggggctttttg

SEQ ID NO: 7439 - DNA, 8388 bp, Homo sapiens
  misc_feature (1730)..(1748): n is a, c, g, or t
  misc_feature (2348)..(2416): n is a, c, g, or t
  misc_feature (3662)..(3677): n is a, c, g, or t
  misc_feature (4998)..(5050): n is a, c, g, or t
  misc_feature (5408)..(5422): n is a, c, g, or t
  misc_feature (5756)..(5773): n is a, c, g, or t
  misc_feature (5826)..(5843): n is a, c, g, or t
gacctgcgaaggcagctactgtctggtcacctgactcaggatcaggtgcgggaggttaagcggcacatcaccgtgcgcctggactggggtaatgaacatttgggcctggacctggtgcctcggaaggactttgaagtagtggactcggaccagattagtgtctcagatctctataagatgcatttatctagccggcagagtgtacagcaaagcacatcccaggtagatacaatgcgcccacgtcatggggaaacatgtcggatgccagtgccacatcacttcttcctcagcctgaagagtttcacttacaatactattggggaagataccgatgtcttcttttccttatatgacatgagggaaggcaagcagatcagtgagcggtttctggtaagactgaacaagaatggtgggccgaggaacccagagaagatagaacgaatgtgtgccctttttacagatctgagcagcaaagatatgaagagagatttgtatatcgttgcccatgtgatccgaataggccggatgctcctgaacgactcaaagaaaggtcctcctcacctgcactacaggcgaccatatggctgtgcggtcctaagcatcttggatgtcctacagtcactcacagaagtaaaggaagaaaaggattttgttcttaaggtttacacgtgcaacaacgagagtgagtggtcccagatccacgagaacatcatccgaaagtccagtgccaagtactctgcccccagcgccagccatggtcttatcatttctctgcagcttcttcgtggagacatggaacagattcggagagaaaatcccatgatatttaataggggattggcaattacaagaaaattgggatttcctgatgtcattatgccaggtgatatccgcaatgacctgtacctaaccctggagaagggggatttcgagagaggaggaaagagtgtacaaaagaatattgaagtgaccatgtatgtgctttatgcagatggagaaatcttgaaggattgcatcagcttgggttcaggagagccaaataggagttcctaccactcctttgtcctctaccacagtaatagtcctcgctggggagaaattatcaaattgcctatccccattgaccggttccggggctcccacctgcgctttgagttcagacattgttccacaaaggacaaaggggaaaagaaactctttggctttgcattctcaaccctgatgcgtgatgatggcaccaccctctcagatgatattcacgagctttatgtgtacaagtgtgatgagaatagcacgtttaataaccatgctctgtacctgggcctgccctgctgcaaagaggactacaatggctgccctaatattccttctagcctcatcttccagcgcagcaccaaagagtctttcttcatctccactcagctctcctctaccaaactcacccagaatgtggacctcctagctctgctgaagtggaaagccttccccgaccggatcatggatgtactagggcggctgcggcatgtcagtggggaggaaattgttaagtttctgcaggacatcttagatacactctttgtgattttggatgataatacagagaagtacggcctgttggtttttcagtctctggtgttcatcatcaacctgctccgagacatcaagtattttcactttcgacctgtgatggacacgtatatccagaagcactttgctggagctctggcatnnnnnnnnnnnnnnnnnnntttgaagtggtatatggactgctcagcagaactgattcgacaggaccacattcaagaagctatgcgggccttggagtaccttttcaagttcattgtacagtcacggatcctgtactcacgagccacttgtggaatggaagaggaacaattcagatccagtatccaagaacttttccagtccatccggtttgtgctcagtctggacagccgaaactcagaaacactcctttttactcaggctgcactcctcaattctttcccaaccatctttgatgagcttctgcaaatgttcaccgtgcaagaggtggcagagtttgtgagagggacactggggagcatgcccagcactgtgcacattgggcagtcaatggacgtggtcaagctgcagtccattgccaggacagtggatagccgcctgttttctttctcagaatcccgccgcatcctgcttcctgtggttctccatcacattcaccttcacctgaggcagcagaaagagctgctaatttgctcagggattcttggcagcatcttctccatcgtcaagaccagctctctggaggcagatgtcatggaggaagtagagatgatggtggagannnnnnnnnnnnnnnnnnnnnnnnnnnnnnnnnnnnnnnnnnnnnnnnnnnnnnnnnnnnnnnnnnnnngagggcagcggtgcccgcagtgcacagccgagatcactggcgagtatgtgtcctgccttctctcactgctccgccagatgtgtgacacccatttccagcacctcctggacaacttccagagcaaagatgaactcaaggaatttctgctgaagattttttgcgtgttccggaacctgatgaagatgagtgtcttccctcgggactggatggtaatgagactgctcacaagcaatattatagtcactactgtccagtacctgtcctctgcactgcacaagaatttcacagagactgactttgactttaaggtgtggaattcttactttagcctggcagttctattcataaatcagccaagccttcagctagaaattatcacctcagccaaaaggaagaagattctagataagtatggggacatgcgtgtaatgatggcctatgaactgttcagcatgtggcagaatttgggtgaacataagatccactttattccgggaatgattggtccttttctgggtgtgacactggtcccacagccagaagtacggaatatcatgattcccatctttcatgacatgatggactgggagcagagaaaaaatggcaacttcaaacaggtggaggccgagttgattgacaagctggacagcatggtgtcagaagggaaaggtgacgagagctacagggagctcttcagcctactaacccagctgtttgggccctaccccagcctgctggagaaggttgaacaagaaacatggcgcgagaccggcatttcctttgtgacctcagtcacccgcctcatggaacgtcttcttgactacagggactgcatgaaaggagaggaaacagagaataagaagataggctgcactgttaacctgatgaatttttacaaatctgagattaacaaggaagaaatgtatatccgctacatccataagctttgtgacatgcacttgcaggccgaaaactacacagaggccgcatttaccctgctcctttactgtgagctgctgcagtgggaggaccggccactacgggaattcctccactacccatcgcagacagagtggcagcggaaggagggactgtgccggaagatcattcactacttcaacaaaggcaagagctgggagtttgggatcccactgtgcagggagctggcgtgtcagtacgagagcctctatgattaccagagcctcagctggattcggaaaatggaggccagctactatgacaacannnnnnnnnnnnnnnncctggagcctgagttctttcgggtcggcttctatggcaggaagtttcctttctttcttcggaacaaagaatacgtgtgccgtggccatgactacgagaggctggaggccttccagcagaggatgctcagtgagtttccgcaggctgtcgccatgcagcaccccaaccatcctgatgacgccatcctacagtgcgatgcccagtacttgcagatctatgcagtgacgcccattccagattatgtggatgttctgcagatggatagggtaccagatcgagtcaagagcttctatcgcgtcaacaatgtgaggaagttccggtatgacaggccttttcacaaaggccccaaggacaaggagaatgaattcaagagcctgtggattgaacgtaccacactgaccctgacccacagcttgcctggcatctctcggtggtttgaagtggagaggagggaactggtggaggtgagccctctggagaatgccatccaagtggttgagaataagaaccaggagctacgctccctgatcagccagtatcaacacaagcaggtgcatggcaacattaacctgctaagcatgtgcctgaatggtgtcattgatgcagctgtcaatggaggcattgcacgctatcaggaggccttctttgataaagattacatcaacaagcacccaggagatgctgagaagatcacccagctcaaggagcttatgcaggagcaggttcatgtccttggagttgggctagcagttcatgagaagtttgtgcacccagaaatgcggcctctgcataagaagctaattgatcagttccagatgatgcgggccagtctctaccatgagtttccaggtttggataagctaagtcctgcatgttcaggcaccagcaccccacggggaaatgttctggcatcccatagccccatgagtccggagagcatcaagatgacccaccggcacagccccatgaacttgatgggcacaggccgccattcatcatcctctctctcctcacatgcgtctagtgaagcaggaaacatggtgatgctgggtgacggctccatgggtgatgctcctgaggacctgtaccaccacatgcagctcgcgtatcccaaccccaggtaccaaggctcagtcaccaacgtctctgttctgtcctcgtcccaggcaagcccttcttcctccagcctgagttccactcactcagcaccatcccagatgattacctctgccccttccagtgcccgaggctctccctctctgccagataagtaccgccatgcccgtgaaatgatgttgttgctgcccacataccgggaccgnnnnnnnnnnnnnnnnnnnnnnnnnnnnnnnnnnnnnnnnnnnnnnnnnnnnngccgccgaatttccagcgagccctgttccagcaagtggtcggagcctgcaaaccctgcagtgatcccaatctgtctgtggctgaaaaaggtcattactccctacactttgacgccttccaccaccctctgggtgatacccccccagccctccctgcccggaccctgcgcaagtctcctctccaccctatcccagcctcccccacaagcccccagtcaggtctggacggcagcaactctacgctgtccggcagtgccagcagcggcgtgtcctccttgagtgagagtaactttgggcactcctcggaggccccacctcgcactgacaccatggactccatgccaagtcaggcctggaannnnnnnnnnnnnnntgagccaccctacctccctgtccactacagcctctctgagtctgccgtcctggactccatcaaggcccagccatgccgaagccactcagccccagggtgcgtcatccctcaggaccccatggacccgcctgcgctgccgcccaagccctaccacccccgcctgccggccctggagcacgatgagggggtgctgctgcgtgaagagactgagaggcctcgaggcctgcaccgcaaggttccattgctcctgggagcgctaaggaggagcaggcccgcatggcctgggagcacggccgaggggagcagtgaggggcaacaaggcggctaggatgcnnnnnnnnnnnnnnnnnntgcaaatcactccaggtctgaaaagcaagtcccccagccccaccccagggagnnnnnnnnnnnnnnnnnncaggagagaaccacccccaagtctccgttctactgccgtgaactcatgtgttgccatgtacagaggccacagcagcatgaagggttgtggcttccctttttatttttttacatttccatttctatgggttttcctttctttcctttatgcagtagatgctttcttcctcctgcagttctggaccatgtggagctacatggagaaattgcacagacagaatcactttgccacactgcagggcccaggagtgggagcccaggccctccctccagggtagagatgcaccgaatggaaattgcactaaggacctcttcctttgctgtatggacagaagagttcatggttgcattcagggattgcaaggaccatatagacatgtcacaggtggaaaaagggccacaagccgttttgcacaaatgcctgcccacctgcccctcttccatccaggagtgtgctactgaggggctggctggaccaacctgctggctcaggcatgtgactggcctaactgcatgcccagggcactgccagggttcaatgggccagccgtctcctactccaccttggatttttctctccatcacatcatttctgaccatttgctcccttccattcttgaaacacctcatgccccacaggagccccagtggtgactggatctgcaagggttatctcccgccctctggggtttgagtggaggtatggagccagagaggctatcctagctaccttcctcctagggggagctggtccccttcctatgtggtagagagactggtgtaagagtgtggggtgtggcaggcgccggaaatcctcaaagctttcagaagcatccagaatgcctaccatcagctcctgaatcagggattttcagcactacctctgagccatggggttggctgcccagccaggcttccaggccctgaggacatgtggtcaggttcagcaggctcctgggtaaagagggtgggagggggcttctccttttggaagcagatagccatgcaggtagaattgtcatctcccaagtggccacatacagcaacccactccaggccatggggaccaccactcagggttcggggctggcaggagggtagtttctccagtctccccagtctgttggtgtctttataggaaactataaagcagagcagtggtgtctttagaggaaactcattcaagtcagggcactgattttcctctcagtttattatttggggggatagggtcaggtgggtatagtagtactttaccagggtgcttttaagttactttaaaaaaagcctacaaaatattttttttcttttatttgctcgagttcacattaatgatggtcacaaggctgccttgttgggcaggcgtattgcccccagttcctcttctgctggcctgtatgacctccacagccaggccctgggcccaagccccttgtcccttctccactgcccctctttccagacagtaaaggccatggtcagtgtgtttttctcttgtaaacaaaccccagcttgtttaacagaaatgctaataacctactgggaaagatggaggtctaaattacctccagggtttttctgggggtttatcaccagtgtgggtcccttctgataccaccaggttcactccaggcagagtggggcggaaggctgctgaggatatgggtcagttacagcagccctcacctcaaagggctggcctgcttctcagcctacattcatttgcaagcttcaatctctggaccatctggtgttcacaggtgttagagggttaggggttaggggctagttttggatttgattcataggtaggagggcttagattttaaggcacttctgaaagtcaatccctggacaaggcagtcatcacataagaacagctaccttctccacttggtggcacaagaggtagggaggggagtatgggttcatttggcttcgcattatgcaaggtgaaaccgtttgttttccctctccattttccctaactaaatgaaaaggacacattctgaaatcccttttgttggagaataagtcagtctgaggggaaatgggaggccagagatgagaaccctttgaaaagattgtaaaatactgattttcattctttcaagcttatttgtaaatacctatttgaatgctgtgtatttgtacaggaatttgagcaaaaaatgtatagagtgtgatgtccaattggtattcagcactataaatgtgtttttaacctcccgcattctgtgcttatttaaaacaaggaaacttctaaccatttcttttgtgtattcatgtttaaagaaaaaaagtgatttaaaaatgatcttacctgtaccagaaaagcaaagttaaaggaaacaaaatttgtaccattgtcccaagaggtattttactgtatatattgtggtagcatgttcaaaatccaacaagtaatgtgaattttagatgtaaatatctgccacttgattttttttccccctttccccacttccttgactgctgtgatgtgaattaaagataaatacgtgatactgaaaaaaaaaaaaaaaaaa

SEQ ID NO: 7440 - DNA, 4020 bp, Homo sapiens
  misc_feature (483)..(507): n is a, c, g, or t
  misc_feature (597)..(611): n is a, c, g, or t
ccctggcattctaaatttcagctccgggaaagagaaggggctttttgccttttatcttttttttttctttctttaagtagtaattttttaactgattcattgtttggaaagcgcatattgcttccctcttccccgaattctggcaactcttcctcctgctatgatgggcccttgggcatcatgaacttcattactcctcactggctggaattcaaactgcccatctgtagtggtcccgtgcgttgaccatgcacctgagaatccacgcgagacggagccctcctcgccggccggcctggacgcttgggatctggttcctgttctggggatgtatcgtcagctctgtatggagttcttctaatgtagcttcctcctcctccacctcttcctcgccggggtctcactctcagcacgagcaccatttccatggcagcaagcatcactcagtgcctatttctatctatcgttcccctgtttcccttnnnnnnnnnnnnnnnnnnnnnnnnnacatctttgggaaaagtggtgggcttatcctctacacctggccagccaatgacaggcccagcacgcggtctgaccgccttgccgtgggcnnnnnnnnnnnnnnnaaggatggcatcttggtccgcatcgacagtgctccaggacttggtgacttcctccagcttcacatagaacaggggaaaattggagttgtcttcaacattggcacagttgacatctccatcaaagaggagagaacccctgtaaatgacggcaaataccatgtggtacgcttcaccaggaacggcggcaacgccaccctgcaggtggacaactggccagtgaatgaacattatcctacaggccggcagttaaccatcttcaacactcaggcgcaaatagccattggtggaaaggacaaaggacgcctcttccaaggccaactctctgggctctattatgatggtttgaaagtactgaacatggcggctgagaacaaccccaatattaaaatcaatggaagtgttcggctggttggagaagtcccatcaattttgggaacaacacagacgacctccatgccaccagaaatgtctactactgtcatggaaaccactactacaatggcgactaccacaacccgtaagaatcgctctacagccagcattcagccaacatcagatgatcttgtttcatctgctgaatgttcaagtgatgatgaagactttgttgaatgtgagccgagtacaggtaggtcagcaaaccccacggagccgggaatcagacgggttccgggggcctcagaggtgatccgggagtcgagcagcacaacagggatggtcgtcggcattgtggctgctgccgccctctgcatcttgatcctcctgtacgccatgtacaagtacaggaacagggacgaggggtcctatcaagtggacgagacgcggaactacatcagcaactccgcccagagcaacggcacgctcatgaaggagaagcagcagagctcgaagagcggccacaagaaacagaaaaacaaggacagggagtattacgtgtaaacatgcgaacactgctcacacgcgagttttcacagttatttctatccacgcctatgaatctttggacggtgagatctcacagatgtcagaactgctggaactatgaaatggggtatataaccacgactctggtggggaaaaccgttttttaaaggacacacacacacacagcgatgcatctctctctaaagctcagccacggctgcggcaaggtcccagcggtcgctgggagacagaaggttttgtgccctgctgtatcataaagcacacacttagcgctctggagccggacggtggctccaccacttccgcaggcctggaaacttccttctccggaggaccttttactaaaaggtagaagacttcatggcttacttgttccataactccaagtgagtctgtaatgtttgtgaagcttgactgtaaccatgttttttctgtttaattatgtaaaaaacaaaactacaacaacaaaaaaagaaaaaagttaaaaaagaaaaaaacaccaaaaaacaaaaacaaacaaaaaaaaaaacccacaacccttatctggttctgaccagtgtgcgtgtaactttatgatctgaggggaaaaatggcttttgggtttttgtttatttttttgataatgactggacatcagaagaggaaaaaaactcaaaacaaaagcgagagagactattgccatatgaactcaaaagctatcatggtgttcactctacatatcaggttatggtgtctctagaatctgttgtttgtttcctataagatgctttgctgaacacatagcaaaattcatgtgacggatgataaattgattcgaaaagctggtcccccaggatctaatttcagaatttaccacccaaacccggaacagatgggtttagggctggtgttatcagagctattggctttacgtaacaatattgttcctgtccattcacccagccaaattgtgttaaagaggaaagccccacaaactaaaacagcctttcctagggaagaggaaggggaggtgggctggatctgtgactgattgaaatgcatgcaaataaaaaagacaatattaaagtctgttatcaaaccagacagtaggggagttcaactcgtgatggaaccacaaaaggtcacacaagccaaccatgtcatgccagagtacaaaacacatagttctttccccgccccgaatgtgacaatggttttcatagtggtttaattttgtagcctgacatttatggataactctgtccttccatttgctcacttctctcttcacccatcttttttaaaaacaaataaatgaataaagctgctgtgacacacacacaaaaggaatttaatagtataatatatatataaataaatatatatacagatatatttatcatggtatgtttgatgggatgactgacacaggaaatctgttaaagtcttaaaatggaatgagaatgttgttttaaaagaaaatagcaaaacaacaaaaaagcaaaccttaaaatgtgaagaaagtgtgaattttagttttgtcacagttaactgtgtcaaagagaattaaaaaaaaaaaaacttcagattttgtttacatattttactacatttttgctggtataattccttagccacctatgtacatactgctttaagaaatgtttttttcctgtttatttctgtttggtttatattctggttgtctttttctttttgtaaagaggaaacaatgtacagaaaaacaataaactggttgtatggccatagctatccgaaaagcaagagacaaagcaagacaaatattcacacaaaaatgaagtgtgtcctctggagggtcatatatacaatttcttttgtacagatgaaaatcaatcagctgcttagatttagaaatctactcttgctggtctttgtaagttgcatgaatatttgactttgaaaaaatatcttaacgacatggggcaaaaagtgcaatctaaatggtagcctttactaatgtgtgtggaaagaggtgttcctcattatctaatatttcaatgtgttaagagtttaatttttttgttatcattaaaaaagacaggattataaagagatatcaaagcacgattttagataacctaaacggcccagcctatacgaagttgattatatctcgatgtctgtaaaagattgctgttcttggagtcttgaggtcttgtgaattgatttcctgctttctttcatttttttcaatttaagtaataatacatttgttatattcctttcagtgtaagtttctatttggacaattttatgggaacatgtgcattctctatgtgagcttctatcatattcctgttttattagcagaacctaaaggaatttatttaatgatgttgtgacattactgctttttcttttttcttttcttagttcatatttgcattttcgttcaaggatatgcttagcaataaaatgttcttcccaaaaaaaaaaaaaaaaaaaa

SEQ ID NO: 7441 - DNA, 2914 bp, Homo sapiens
  misc_feature (933)..(951): n is a, c, g, or t
  misc_feature (1282)..(1344): n is a, c, g, or t
  misc_feature (1908)..(1934): n is a, c, g, or t
ccacgcgtccggcagagagggctgactcagagtctgcacatggggtctgcttccaagttcttccaactgggcatatgcctccgccactctctgactgtcctttgcctgtgccaaggtttctgggaagaacaggaagttcagggatggcggaaaatgtttggcagaatccctgagtccaaagccggagcacctgctcctgcctgagggcagagaggactggttttatgacaacagatgaaaggaaattattcaaccacctcaagtctcctcatctgaaatattgggttccattcatctggtttggaaatcttgcaactaaagcccggaatgaaggtagaatcagagacagtgttgatctgcaatcattgatgactgaaatgaatcgataccgctcttggtgcagcctcttattcggttatgactgggttgggattccgctggtttacacccaggtagcagagcagcttatcaacccttttggagaagatgatgatgattttgaaactaactggtgcattgacagaaatttgcaggtctctcttttagctgtggacgaaatgcacatgagcttacccaagatgaagaaggacatttactgggacgattctgctgctcgcccaccatacacattggcagctgctgactactgcataccctcatttctggggtcaacagtccagatggggctgtctgggtccgactttcctgacgaggagtggctgtgggattatgagaagcatggccatcggcattccatgataagaagagtcaagcggttcctgagtgcccacgaacacccctccagccccagaagaagaagctacaggaggcagacaagtgacagctccatgttcttaccccgagatgacctcagcccagccagggacctactggatgtgccctcaagaaacccccccagggcctcacccaccnnnnnnnnnnnnnnnnnnncagaaggaagccccacgctgcacttcagcatgggagagctgtccaccatcagggagaccagccagacaagcactttatagagcctgaccccacagtccagtgtgagaacttcccccatcaaaatgccactggtacctgaggtattgatcacagcagccgaagcaccagtgcccacatcagggggctaccaccatgattccgctacctccatcttgagctctgagtttacaggggttcagccaagcaagactgagcagcagcagggccccatgggatccatcctgtctccctcagagaaggagacacctcctggaggccccagtccccagannnnnnnnnnnnnnnnnnnnnnnnnnnnnnnnnnnnnnnnnnnnnnnnnnnnnnnnnnnnnnnctaaaaaggtggagtcttccgggattcctggggtccagccacacttccctgggaaacctaagtccagaccccatgagctctcagccagctcttttaattgacacagaaacatcctcagagatcagtgggatcaacattgtggctggctctcgagtctcttctgatatgctgtatttaatggaaaacctggacaccaaggaaacagatatcatagagctgaacaaggaaactgaggaatcacccaaatgagtgccaccaagttctaggacctggttctagcctagattcttacctccccaaaagcagcatattaggcccaggacatacctgaaggctggtcgactttttaaaaaacatgatcacactgtataagctacttagaactttgaagggcattatgatcctgactttttgagagctgcgaaaaatcaaacgcattcacgtcatccaacacaacatggctttcatcagaagttacacagaccacagtgatttagccaaataagtcttaaccaaaaaaaggaatctgaaaaacatacatgacttataaattcatagattatnnnnnnnnnnnnnnnnnnnnnnnnnnnatagtccaatcccctagacccaaaggcccagacacgcagggttctctatttctcttcttttttctctttctttttttctttagccataaagaaaggagatggatcacctaatgcctgaaagatcccctccttcctaacgtttttgtttgaggctttctaaccatctcattcctacttttataactattattgttattatcacttcctgattcttaagcttcatcagcaccagaacacttaattctcttcaatttccttttttacttttctctcttttccttttattctgtcatcctttttttcccttcccttctccctggttgtgctgcttttctagtaatctgtcccatttttcaggttataatatttcctcttgccaaatctgttgcttatgtcttgccatgaatttcaaaatataagacattggcaaagcctcctacagaatcatcaaaggtgtcaacaaatccagcctgataccgttccagtctcacttccagtggaaggcatataggagtgatggttccccccgtgcccttgcagccattgacatttctttctgcttccactatttggtgttgggcactggagaaaaacgaagccaagagaatatgaaatttgcatagccaaatgctatggaaccaaagaataagatgactcacatctgtttaacttgaactcttatgcaaaaatcctaatcgtgtcgcaacacgggaccagttactgtgtctatcgggtcatttgggaatgggcaggatactggagctgggaggctaatggggtccagagctgcataatggggatcggatgttggtactcctcccagggagctctcaggacagctgtttgtcgtgggctcccaagtgcctaggccatgccttacgactgctgcacttaccatttgtcatatgatggcacttgactacatatggctttagaaataaaataaccctcaaaactaaaaaaaaaaaaaaaaaaaaaaa

SEQ ID NO: 7442 - DNA, 1103 bp, Homo sapiens
tttttttttttggagagataggatctcactatactgcccaggctatctcaaactcctaggctcaagcagtcccccggcctcagccgcccaaaaagctgggattacaggcgtgaggcaccgctcctagcaaggctgggttttctgaactaaggcacatcataattttggggaaaatcagaacagtgctcttattatactattccctgaccttaataattctctagttctaaattattttttagtaaggacctgtctgctattgaatagctctagattattatggtttatctagcagacattgtgaacaattttggcgcaactataatcaatcagtgcaaaggttttggtcagagtcaaggagagaagaaaaatgaagttataagtatcacatatatatattaccaatcaaccccttcaaggaagaattttcaccagtctgtggctcttgggaatatttttcaaatataccaaacacaccaaaacaaattatttcagaagaaggtgatattgggagcagtatgaagataagcaacagtctacttccaaacacacccagaaaataaaccaaggaaagcatccattttagacacacctttctgataaaacacttctcatgaaagaaagaaaaaaatgtaatctactacagaaatatttaataaaaatattaatcagtttaaatccttgaggctactaaccaggcaaaattatttcctgaagtttttctggagtaattccttaaaagtagtgtcttaagacatgttagaaagagtacttattttaatctaggattgagacacccattccaacatttcagtctggactcttttcatctaactagtctgtcagcttaaaaaaatatctgaatgcacaatgtttacagtgtgattaaaatgttaattatttttgaaattctttatacttcgaaggattttaaaaagaaagttttattttatatcaaacagactttctgagtgattttcttcccatttttttaaaactttttattttaaaataatttcaaattcgcggaggagctgccaagatagaatagaattctgtatacctttcagaactctagctttggcaactcctccgtaaatccc

SEQ ID NO: 7443 - DNA, 1583 bp, Homo sapiens
cttttcttaagggaaaaatcacgctgtgttcttttaaaatccctcaggttttatgttttattgctaccagagtctgcctccctgaggttcttgtatagactagttatttccctctgtaaagaagctgttctattcgttctcgcctggtttggaacaaactgaacacttccaaaggaggcagtccttgcagccttgtctccttccactcccctcctccccacagtcctggctggagcagcgagtctgtcgatcccaggccagagacaaggcagacaaaggttcatttgtaaagaagctccttccagcacctcctctcttctccttttgcccaaactcacccagtgagtgtgagcatttaagaagcatcctctgccaagaccaaaaggaaagaagaaaaagggccaaaagccaaaatgaaactgatggtacttgttttcaccattgggctaactttgctgctaggagttcaagccatgtctgcaaatcgctctcttgctacagaaagatactaaaagatcacaactgtcacaaccttccggaaggagtagctgacctgacacagattgatgtcaatgtccaggatcatttctgggatgggaagggatgtgagatgatctgttactgcaacttcagcgaattgctctgctgcccaaaagacgttttctttggaccaaagatctctttcgtgattccttgcaacaatcaatgagaatcttcatgtattctggagaacaccattcctgatttcccacaaactgcactacatcagtataactgcatttctagtttctatatagtgcaatagagcatagattctataaattcttacttgtctaagacaagtaaatctgtgttaaacaagtagtaataaaagttaattcaatctaatttttctctgtggaaaaaaaaaaaccctcccccgccctgacccccctatacctcccccgcccccatgacaacgaacccccaaacccaaaagggggggcggggttaaaaaagaaccccctcaagggggcccaaagtttttcccgggacccccgagtcttcctttgagaaaagggggggccctccaccacagcggaggcccggcctttctacagctttaggggcccctggggccgcgcttcttttttcacacccccgttcccgcgaaccgggcggaacaacatgtggatataacctcgggggagaacctcttctgggagagagagggagaccctctttattcttctcgggggggggcggcgagcaccataattggggggccggaatctccccctacagcggaagaatattcgcacggcctctcccaggggcaacacttataaaaaatcttttcagcgcgcggaaataacgcggggccaaaataacagcccggaccaaactgtgtgtcgcccacttccaccccaattctttgccctttccgcgcgcggacccgcccttttcccacaaatagttcccaaaatagggccgccttgaggcggtttctccccgtgtggcggccgggcttttttataactcctcacccccccatggggggctctctttttgggggcgccccccgcatctaccaccacagatcg

SEQ ID NO: 7444 - DNA, 8899 bp, Homo sapiens
  misc_feature (133)..(167): n is a, c, g, or t
  misc_feature (2173)..(2189): n is a, c, g, or t
  misc_feature (2947)..(2972): n is a, c, g, or t
  misc_feature (5055)..(5069): n is a, c, g, or t
  misc_feature (7333)..(7350): n is a, c, g, or t
ttaaataagtagggattgtttaaaaaaaaagctgtaatatgttatctgggggtggatgatcctggtgttagttaaagctctcagtgatgtctgtgctgggacttccgggttcctgttggacttttcctcccannnnnnnnnnnnnnnnnnnnnnnnnnnnnnnnnnnccgaatccatcccatcagctcctgggacactgcctcatttcatagaggagccagatgatgcttatattatcaagagcaaccctattgcactcaggtgcaaagcgaggccagccatgcagatattcttcaaatgcaacggcgagtgggtccatcagaacgagcacgtctctgaagagactctggacgagagctcaggtttgaaggtccgcgaagtgttcatcaatgttactaggcaacaggtggaggacttccatgggcccgaggactattggtgccagtgtgtggcgtggagccacctgggtacctccaagagcaggaaggcctctgtgcgcatagcctatttacggaaaaactttgaacaagacccacaaggaagggaagttcccattgaaggcatgattgtactgcactgccgcccaccagagggagtccctgctgccgaggtggaatggctgaaaaatgaagagcccattgactctgaacaagacgagaacattgacaccagggctgaccataacctgatcatcaggcaggcacggctctcggactcaggaaattacacctgcatggcagccaacatcgtggctaagaggagaagcctgtcggccactgttgtggtctacgtgaatggaggctggtcttcctggacagagtggtcagcctgcaatgttcgctgtggtagaggatggcagaaacgttcccggacctgcaccaacccagctcctctcaatggtggggccttttgtgagggaatgtcagtgcagaaaataacctgcacttctctttgtcctgtggatgggagctgggaagtgtggagcgaatggtccgtctgcagtccagagtgtgaacatttgcggatccgggagtgcacagcaccacccccgagaaatgggggcaaattctgtgaaggtctaagccaggaatctgaaaactgcacagatggtctttgcatcctagataaaaaacctcttcatgaaataaaaccccaaagcattgagaatgccagcgacattgctttgtactcgggcttgggtgctgccgtcgtggccgttgcagtcctggtcattggtgtcaccctttacagacggagccagagtgactatggcgtggacgtcattgactcttctgcattgacaggtggcttccagaccttcaacttcaaaacagtccgtcaaggtaactccctgctcctgaattctgccatgcagccagatctgacagtgagccggacatacagcggacccatctgtctgcaggaccctctggacaaggagctcatgacagagtcctcactctttaaccctttgtcggacatcaaagtgaaagtccagagctcgttcatggtttccctgggagtgtctgagagagctgagtaccacggcaagaatcattccaggacttttccccatggaaacaaccacagctttagtacaatgcatcccagaaataaaatgccctacatccaaaatctgtcatcactccccacaaggacagaactgaggacaactggtgtctttggccatttaggggggcgcttagtaatgccaaatacaggggtgagcttactcataccacacggtgccatcccagaggagaattcttgggagatttatatgtccatcaaccaaggtgaacccagcctccagtcagatggctctgaggtgctcctgagtcctgaagtcacctgtggtcctccagacatgatcgtcaccactccctttgcattgaccatcccgcactgtgcagatgtcagttctgagcattggaatatccatttaaagaagaggacacagcagggcaaatgggaggaagtgatgtcagtggaagatgaatctacatcctgttactgccttttggacccctttgcgtgtcatgtgctcctggacagctttgggacctatgcgctcactggagagccaatcacagactgtgccgtgaagcaactgaaggtggcggtttttggctgcatgtcctgtaactccctggattacaacttgagagtttannnnnnnnnnnnnnnnncttgtgcatttcaggaagtggtttcagatgaaaggcatcaaggtggacagctcctggaagaaccaaaattgctgcatttcaaagggaatacctttagtcttcagatttctgtccttgatattcccccattcctctggagaattaaaccattcactgcctgccaggaagtcccgttctcccgcgtgtggtgcagtaaccggcagcccctgcactgtgccttctccctggagcgttatacgcccactaccacccagctgtcctgcaaaatctgcattcggcagctcaaaggccatgaacagatcctccaagtgcagacatcaatcctagagagtgaacgagaaaccatcactttcttcgcacaagaggacagcactttccctgcacagactggccccaaagccttcaaaattccctactccatcagacagcggatttgtgctacatttgatacccccaatgccaaaggcaaggactggcagatgttagcacagaaaaacagcatcaacaggaatttatcttatttcgctacacaaagtagcccatctgctgtcattttgaacctgtgggaagctcgtcatcagcatgatggtgatcttgactccctggcctgtgcccttgaagagattgggaggacacacacgaaactctcaaacatttcagaatcccagcttgatgaagccgacttcaactacagcaggcaaaatggactctagtccacttcctcccatgagacagagtgatggccagcttggggacannnnnnnnnnnnnnnnnnnnnnnnnntttctgcccagtggcgttgggggaattcagccttcatttataatcagtgagattcccctgttgaagaaactaaattttatataggtaaaacatgttaatagggaagagtacaagctctcttacatataagagggctctactatctccttggaatccacatttgggttaactcctcagatttggagtggcaaggataaaagtgagggcagaagtagctgtgggaaaagatgagctatgataatgctgggaaggcagagattgattaagtgcatgctttgaaataggtttttaatgatgtgccccaaagggccagctgattctggtactagattgtcagagttttctaccaactggcatctgtgatgtcagagatcattgtaaaaatggcttttagacgtgaaacagggttgccaacccatttgtatgacttcaacaacgtcaaggagggcatttagaatttagaatctgagcacatcacaccagcaccagctccctgtctcttctagccacttaatggagacacaatggagaggtaagacagaccacaaactagttcttatagtgtactccaccttttacttttttcctgagacaaatctacccttattctttcttcctcttccttaccccttgcagtagggaggtatcaaggagcataattaaacttgtcaatacggaaagttgttttttctaacacaacaaagtgggaccatctctattcccatctaagccactcaaattgctgagtgctattagaacacagcttattacatggatatggggacaggagagattaaagcaggttcaaaaacacatgaactgcagatgccataggcctcaaatcagctgtaattctaggagacacgtgttgatctagttatctaacattgttgttataagaaaatgagtttactgcatttttcaatccagattcttgaaattgtctaacatgtgggtactgtgtcatcacaaaatctctcagtaaggctatatgtgatcctcattttgcctcttgggaaattagcagatagtctttgctctaaatgatatctgagtaaatagacttgaggaatcctctaccacagtgtccctgaaaccacatgcatcattcaggaagccttcaccctgtgactattcagcctccctgaatatgctttctctatagaaccactaacatatggctattgctctatgattttttttttttacattaggaggcagtgatattgtggaagattgaaatccacagataattcatgaccctcatcttatcactttactccatctttttatcctattaaattatttttgacaagatgtcctggtagactaaaggtgaacagatttgctcttgctcatcttctggtggatattttaacttgctattcacaatcaggacaaccaaagtcaaggacccagatgaaccacaaggcagctagtcagctacttagaggttggttacattcgaataaaaagtagtcagggaatgggggaggtggggagttggggagtacttggcagttgggatatgatccatttttttaaacaagttttttgtagatcccttgtaaaataataataataatgttgtgaatctccatgccaagtgaaaaaggcctaaagatgagttgaatttgtgataccatgggtaaggcatggaagaactcttgaatgtgttggccattttctctaactaacatgtggtatgtatggtcccctatattagatagaagtctttgctacatgtaattcaaaagcatctcgcttttctcaggaaccaaaggcttatgatgtaggacaaagaaatcatcttagaactgtcaagcatattttcacaataccatgtcaagatcaggaaaacacccttttgctagtgtgcttaacttatttatttcttctaggaaacaatagataaacagcatgaaaatgtaaatcatctggcatcactgatagaatttctgaaagagaaagagaagtagatggtcaaccagtcactagttggttggcatgaggtggtgtgcagaggaaagctgcattcactattgagtaaaaacttgtagaaagcacattatagagcttatgnnnnnnnnnnnnnnngaggatttttgttttaaactgtctttagcattttccctcttcccttctaatgggcattataattgtttcatctactctgtgaatctacataggtctttttttttagatgtttgatacattttaagtatttttaaatagatgaaaattctaaatgattttccctcaaatctatctagattattttaagatgagacaagattattgtcaatccctgaatgtctggagttacctcccatggatttttttttcctttggcctgggttttataaacaacttgaacatcatatcatataggataacaaaggaggaagttaacttaattcacctcagacttcagcctaagattcaatcaaattcatccttcagcctgtcttgtttcttctttatgtttcttttacttattgctgctaggatcctacataggatttctatagaaatgtatgaaattctgtggtcactgcatgtcaggattgcacagtatgttacaatacaatttcaaagagaacccacatttgtgagatttacagaccaaggtgtggtggaggaggtagaattgcagatcagataaaaagtgagcttacacttgaacttagttattcactgtgacctaaatttagtcctattgtaatatgtgcctgtcacaacacaaatacccctcttgaaagagatttactcatctatccaagcacttaatttggaaattttattgtcctattgcaaaatgaaacaaaattaaaagtggcctcgagtacttggtaagttacttaaaatttttacaaaaatatcccactcaatgccaaatctttcagtcctcaaaggcatttaagtccaatagtcatgctttaaatatggctttaaattatgccaccaaaatggtgcacttcacagattcaccagactgtagcatcataaagttaatttacagtttttacaacattgcttctacattcttactggtttacattaaaatcctttaagccaaaaggaagcttgctctatggatttaaatgcaaacttcatttaccagtgcaggaagtctcataaaactcagatgtactcccacaaaaattttattggcctttttgtaagagatgaaaaagaattgacacagttctctttaaagagaagaacttttttattattatttttatctccaactgcaggtggtgtcttttgccaaggtctctgtatttttctttcagttgtctttgggaggggatgttaagtcaaatcactaaaacagggttctctttggattaaaagttctggatttattgcaactattttccttgagaaacattctcagcatcaggattgataaacaaatgtagatgattaaaataggataattggttttagataatatcttctactgccaaacttctggcaaatttacctgtgaatttcaaaatgttataaaatctcttgatatgcttttgtttttccttttagccattttctcttcaatttcttagtccctctgccctctgtaaatgtgttgagtgatatagctatcagatgtattgaaggcaaagttctcgcagaggtctctgttccagctctgtaaaggtcacaggaatcgtgaaggagctgagaaatcttcctctccggcccactgtctgtggcccattgtcattgtttcctcatgaaacattgcagagtttgaatcctcagtaactctcattgactggattagaggtgatggccacagcaaatgggagagcaaaatgttggcctacagagaatgacacaattttattcgcctttggtgttagttgccatagtgctgtatttgaaaatcgatgctttagccaaaagctgaatgaccaccgtttccgtagtttccactgttttgtctgcatagaattttcctgaactacaagcaaaaatgtattttgtccaatgtcacaaaagtgaaaatgttactaatcttagatgtgttgcatattttgtgtttttacgttccaaactctttcaaaagctgccgttacaaagctgtttggctgtattgacagcatgtggtgtttttacaaaagcaattctaggagagccagtgtctaccatgaactcctgacatccccactccagggtcattcatgacattgaaatggcaacttgtacactgtaattcttcgaaaagtaacaggggatggaaatcagacctggccgttagtcactagtgtgtagtaccgtgatctgaagtaggaaatttaactgacatagaataattgtggtttttgaagcagctactcattgctttttcnnnnnnnnnnnnnnnnnntggattgggaatgtcctcgtgaggtggacctaaggcagtaacatttaaacttcatgtcctagcacccgccctccatctgacccaaagataaaaaaggcatcaagcttcatggttatgcctaagcttaaaaattcccttcccactactaatattgagttcaggcagggccccatcttacttatttttcaaaaaagttatagctttgaattatagactatattactaaatttggtaaggtagttctttgcatgaatgggaatgtgtgtcaaaatactttcacaaaaggcatgattacaatggaaatgcccctttgcctccagttttgctaaccctaaaaagtatttcactaatttcaagcactgtttacactcaaatcccaaaattggccaaattatataattctcttaaattttcatttctgtaggtggagatttaactatggttctggtgaatcatagaagggagagacaatatttgaggggagtttatcagcagaatatcatgccttatgaccccattactgaaacacagacattacaatcagaaatagacctaataattccaatatccctccattaactagttccagtgatgctgagagacacagcaccctgtgccaggtatcagaaatataagcctcagcagagggtaactgaaaactttcaatcagaaacactctccaaggcttatggctagattatgtaggtcactaccattcaaaacttttctatacaaaggtggaaaagcactcagaatctgggaattttctggttggaagaacaatgttctccttttccaaattggaataaagactcagaattacccattcttcataatcatgtctgattggtacatacactccaggaagtctcaacctagaaacatttccaacctaagcatttaaaggaaaactggctcattcttctgacccaaactcaaaaaatatgagtacttgcgtacctccatttctgcatgaagattttaaaacagatttcatttttttctgtttattttgggaaggtgcgtgggggtgttctttcaagtgattcacatctcaaacccataccactctcaacttttatttgatgtgttcaaagccaaaaaataaaataaaataaagcagggctgaacacttaatttgacatgaagctgaaggactgagcaagccagaggagagaggttgaatgaagcatagccttggcttcataccacactttttgtgccttgtattatcaatgtaaattctgaatgttgtacagtaaacttggatggacttcttagaaaaggctgcactggcttctttttcagcacatgtacatatctataaatatatatacatatatatttggtaatgccaaacagctctgttatattgtattgaacaaaatggacggtttggatgttttatgtcgagtttgcaaaaaaaaaaaaaaaaaaaaaactggatggttgcagacttttcaagataaatgtacagacgtaaattactgcatatcagttatttatgaataaagagtcttttattgacaaataaggataaaaaaaaaaa

SEQ ID NO: 7445 - DNA, 822 bp, Homo sapiens
  misc_feature (80)..(80): n is a, c, g, or t
ggaagcagaaaaggtgactttggggccatactccagccatgtgagcagaagaacgtgacacgggccagaagccctgcccntgcgtcaccaccaccatcacttacgagacgcaaagtaagtctgtggaattggggagctgctattttctgtcctgaaaacgtaaaagaacccagttcgcagcatcagaatagattctaacctattttattctccaatccatctccctgacaacaactccaagggcaaatgaagaaagattacttgtgatttgccagccaacaagactccagattttttgaggaattaatgagacatttaatgtagacacaaatagaataaagtaactatgtttctaaggtaatttaaggctgttgtaatttgatcaaacccaggatggatgttccttcattctgttgctacatgtattaaaaccacattgactggactctaatgattcagaaattttaaagctttcagagaaaacgtgggctgttattctttaacgctaaacatgaagaaaaggatttgcaattctgagcaattacctttcccccaaaggctttccaaattgagcgtctgctgaaaatcagccctccctgagcaccagctccctcccttccggggctctcctctgtgccttcctgcagccttcctaagcagacctcacgtttctcaaggacggtttgtctgtttcctcacccagccctgagtgcgctcccgtgtgcactctgcacagtaaggacgtgtacagaaactgaggagaaggaacaggacaagttcctttcagaggatgggtctaatgtccaggaacgcttccaaaag

SEQ ID NO: 7446 - DNA, 857 bp, Homo sapiens
  misc_feature (778)..(778): n is a, c, g, or t
taggattttcatcaccctgttttttctttctctacatcagctacaagaaaaaaaaaaggagttactgagcaactaagaagtcacaactgttttcagttttattaatgagttgttatacttattttatagatagagaattaccattataacattgctccattgcccactcatccattcacgcatctgtccatccgtccatccacccatttgtccactccccaaatggtcatcaattgtctactgtgagccaagcaaagtgctccttactttggactctgaatccagtgctctttctacttcaccatagacacatgccccttgagtataagggagcttgattcattcaacaaatatctgttgtccatctccaatgtactggcatattctaaatgcatccaacaaaaaccaaaatgaaaaaaaagaaaaacccattccttcaaggggattgcattcggactgggggagacagataaaataaaaataatgaagtcaaatatatatgttagtgacatgtgccatgaagaataatgcccaataggtaaatggggcaattaacaaacgtaatgtaaataaattagttccaagaaatcattgactcaccaacagagggaacacaatttggtccatggtaaaatattcctttggtattaataatttcttctcctaaagtatttcaggggctgccaagctggctctcctgtttcctcttccttgggggctgattgcatcccatgatgtgcccggttttgagatgctcctcgtggaatgaaattggacngtctggttcctccatccttggcagggagcctggacaggaataacttctgtgcctttctcccgctacctttagctggaaa

SEQ ID NO: 7447 - DNA, 2890 bp, Homo sapiens
  misc_feature (646)..(657): n is a, c, g, or t
ttcccttcttccacgagtgaggacatagcggtgacacgtaactttcggcataatcggcgccatttttttttggaccctaacggggaccaaccggcgctcggctgccttcgcttaggatcagttgaccagtacctggcccggtgcacaactggcacccagtgcttcccagcaaccctctcgaagcagtccatcacattccaaatcggacgcatgtgtcttcgcgtagactcagattctggagacagagaatggacctatctgtaaccttatacttataaagttcctagcataaaaggaataaccccacataaatatggtaacacaatgaaaataaaacctaacctagttaggacaataatttaggaaataaatattgaaaaataggatttgggccaggcgtggtgggctcatgcctgtaatcccagcactttggggaagctgaggcaggtggatcacgaggtcaggagttcaaaccagcctggccaaacatagtgaaatgtcatctctactaaaaatacaaaaattaactgggaatggtggcaggcacctgtagttccagctactcggaaggctgaggcaggagaatcgcttgagcccggaggtggaggttgtagtgagctgagatggcaccactgcactccagccnnnnnnnnnnnnctttggtaaccctgctagggggcgccgctagattccatcctatttctccgatgaaagtatcagaactctcatcacctgcaaatctgggggaaatgcaggtgcgcacagagagcgttttgggcaaagacggcctttaagcttttcttcactaagcatgccgctcgctagcggaacagcagccagctctggacgggaccttgcacagttccgatgacatcacttccgggcgccaggttcgggctttctcctgcagcgataagggcagacgacagtctttagtagggaaaggagacaagtgctagctactgccgcccaagtggaaggaattatctatagagtaagtatgctaatcttgactaagactgcaggagttttttttaaaccatcaaaaaggaaagtttatgaatttttaagaagttttaattttcatcctggaacactatttcttcataaaatagtattgggaattgaaactagttgtgatgatacagcagctgctgtggtggatgaaactggaaatgtgttgggagaagcaatacattcccaaactgaagttcatttaaaaacaggtgggattgttcctccagcagctcaacagcttcacagagaaaatattcaacgaatagtacaagaagctctttctgccagtggagtctctccaagtgacctctcagcaattgcaactaccataaaaccaggacttgctttaagcctgggagtgggcttatcatttagcttacagctggtaggacagttaaaaaagccattcattcccattcatcatatggaggctcatgcacttactattaggttgaccaataaagtagaatttccttttttagttcttttgatttctggaggtcactgtctgttggcattagttcaaggagtttcagattttctgcttcttggaaagtctttggacatagcaccaggtgacatgcttgacaaggtggcaagaagacttcctttaataaaacatccagagtgctccaccatgagtggtgggaaagccatagaacatttggccaaacaaggaaatagatttcattttgacatcaaacctcccttgcatcatgctaaaaattgtgattttccttttactggacttcaacacgttactgataaaataataatgaaaaaggaaaaagaggaaggtattgagaaggggcaaatcctgtcttcagcagcagacattgctgccacagtacagcacacaatggcatgtcatcttgtgaaaagaacacatcgggctattctgttttgtaagcagagagacttgttacctcaaaataatgcagtactggttgcatctggtggtgtcgcaagtaacttctgtatccgcagagctctggaaattttaacaaacgcaacacagtgcactttgttgtgtcctcctcccagactatgcactgataatggcattatgattgcatgatgtcctcttggagtagacatatcaaaagaagttggagaagcttccataaaagtaccacaattaaaaatggagatatgatttctgctgttcaaaaaagtccctaaagggtctcactctctgacctcagctggagtacagtagccagatcacaactcactgcaaccctgacttcctgaactcaagaaatcctcctgccttagcctcttgaatagccgggactacaggtgtgcatgtccatgcccagccaactttatttctattttttgtagagacaggctcttgccatgttgcccgggctggtcctgaactgctgaattcaagtgatcctcccaccttggcctccagaagtgctgggattatgggtgtgagccaccatgcctagccaaaatgtttcttaaggtatacattttgggtcttagaagacttatacatttgtaatatttattactaaatatctcaaagtattacaataaatgttaccatgtgagctactttgaatcaggcttcttgcacaccaatttaaaaatgttaactcttgatatatacactagttataccactcatgtcagtcaataaattttaaggtttaagtgcaggcctttgtttacagaaatcctaattttttgaaaccataactctgacctgacactaaattcctgtagacatgctaaggaaaatctgcttagtatcgagatcaagaacttccattcaaaaagattattcagttatgttatttgcatattaccattgttaaaaataaaaaaatttttaaaagaaaaaaaaaaaaaaaaaaaa

SEQ ID NO: 7448 - DNA, 3074 bp, Homo sapiens; identical to SEQ ID NO: 5319

SEQ ID NO: 7449 - DNA, 956 bp, Homo sapiens
aaatctgggacaggcgatcgtttttagtgtttctgtctcaaagactgaaaaaacaatagcatttgtctggagtgaggaagtgagccccgctgtgttcatagcaggagagggctcccagacacaggccccgtccttggaagagccttgagagtgcagctcggacccaccggcggcccccgtagcaggtggtgtgggtgctcgggagtggaggtgacgtcagcagcgctctctgaccgcgggtgtcacgggcatttctcaaaggaagcaggggattcagtgagtgtgaaggtgaacaggatggcctggcagcagggatgtttccgtgagccacaaataccagaaactgaggcgaggctcccagcagccggtagggaaaggtgtttccaggggtccgagggccgtggcctgcgtggccatcccctggagagaggagccgctcagggtgcgcgtcatggagtgtgctcaggggtgcgtggacacctctgctgtggtttgctgctgggggcgatgggagcgcctctccgtcctgtgccctggtccaggatgctgacagcagtgagaggcctgccgtgaggtttggtcttgtcagacctgtagcctggacctcgccgggggaccagggagtgcacgtctgtagatctgtacatatctgggcctttggaggccacgtgtggcatgggaggggctacctggtccctttcacagccaggacacgcctggatgagaaagcctgaggtgcctggcatgcccaccggtgccactctgcagcctccacccctggcctgagtccccctccatccgtcttggtggacacctgtgtggctctcacctgcgttttgagtctgttcttccaggagtaataaattctggacatcatcactggaaaaaaaaaaaacttttctttctcatttgaaactttgtttccactttagaaaataataaaagtattcctcgtg

SEQ ID NO: 7450 - DNA, 4740 bp, Homo sapiens
cggacgcgtgggcggacgcgtgggcggcggccggggcggcggtagcgcgcagcccgggaatcggagcgggacctgcgctgagagcccggcgctcgcccccgccgcgggccgcacggctgccgcggctgctagtgctgctagcggcggcggcggtggggccgggcgcgggcggtgcggcgcggctgtaccgcgcgggcgaggacgccgtgtgggtgctggacagcggcagcgtgcgcgggccctggctggggatgtgcgagactgggccagtgccattcgcgtcgcagctctggactgcatggaagagaagaaccaggccgtgtgccatgactacgacatccacttctaccccaccttccggtattttaaagcatttacaaaggagtttacaactggagaaaattttaaaggacctgaccgagagctgcgaacagtcagacagacgatgattgacttcctgcagaaccacacggaaggaagccggccccctgcctgcccgcgcctagaccccattcagcccagtgatgttctttcccttcttgacaaccgtggcagccattacgtggctattgtctttgaaagcaacagctcctaccttggacgggaggtgatcttagacctgatcccgtatgaaagcatcgtggtgacccgagcactggacggggacaaagcatttctggagaaacttggtgtttcttcagtcccttcgtgttacctgatctacccaaatgggtcgcatggattgattaacgtcgtgaagcctctgcgggccttcttttcgtcttatttgaagtcattgccggatgtgaggaaaaaatcgcttcccttgcctgaaaagccacacaaagaagaaaattcagaaatcgtggtttggagagaatttgacaagtcgaagctgtacacggtggacctggagtcagggctacactacctcctgcgggtggagctggcagcccacaagtccctggccggagcagagctgaagacgctcaaggactttgtgactgtcttggccaagctgttccctggacggccgccagtcaagaagctgttggagatgctgcaggagtggctggccagccttcccctggacaggatcccctacaacgccgtgcttgacctggtcaacaacaagatgcggatttctggaatattccttactaatcacataaagtgggttggatgtcaaggaagccgatctgagttgaggggttacccgtgttctctctggaaactgttccacactttgactgttgaagcctcgacccacccagatgcactggttggcacaggctttgaagacgacccccaggctgtgctgcagacaatgaggaggtacgttcacaccttctttgggtgtaaggaatgtggtgagcactttgaggaaatggctaaagaatccatggactcggtgaaaaccccagaccaagccatcctctggctgtggaagaagcataatatggtgaacggccgcctggcaggccatctgagtgaggatccccggtttccaaagcttcagtggcccactccggacctctgcccagcctgccatgaggaaattaagggcctggccagctgggatgaaggccacgtgctcacattcttgaagcagcactatggccgcgacaacctcttagacacgtattccgcagaccagggggattccagtgaaggaggaaccctggccaggggtgaggaagaggagaaaagactcactcccccagaggtgtcccatggagaccgagacacccagagcgtccgtccacctggtgcactgggccccaggcctgcccttccagagagcttgcatcacagcttggacgggaaactccagagtctggatgggcccggggcccacaaggaggtgggcggggccgcacccttcctcggggttgacttctccagcctggacatgagtctctgtgtcgtgctgtacgtggcttcatccctgttcctcatggtgatgtacttcttcttccgggtgaggtccaggcggtggaaggtcaagcaccaccacccggccgtgtgagtgcccgggtgctgccagccacggcggaagctcccttggaggcagccctgccccgtgccacctgcagctttaatatttatgatcagggattttataaacatgcgggcctggtttcacatcggatggcaccttttggcttcaaagtcctggttttacaaacgctcttctaacaagggaagaacacggggtaattttgtggggatatttgcattcctggcgtactcaagtctgttcatgctccttttgcaggtcttacagcaaaaagacttctgtatttttactcttctagatgtgaaaagagggtgcagagtccaggccagatagtcttccccacacactttcatctcgtttcctccactccgccccatcctgcagggccttgtttttgtatttggagaacctcgcccatcccccccgcggctcctggctcccccccccccaccttggccctccctgcaccctccactcccctcgctcccccctccccccgctccccccacgccccctgctccaggctgccaagtgttttcctttagccgggcggggacagacagagccggaagcgcagtcggcctctgcagcccctccaagcaagtgctccagggactatcctgtgtttgtagctgcttccctagggcaggttcctgagggctctccttgttcctccgggtgttcgacaccagacgtggggatttcaacaggggaggagccaaggaattctgtggctgtgctgcgtttcagaaaataacccccagaggccttgggctgtggacctgggggttggaaggatgggggctcatttaaccctcagaggcagcgcctttgtctgtctatctggtgacaagagagagacaagtaaatgggggccgttgggacggcgggtgcctggagggcagctctgggctcagcgggcagtgcttagagcacaggcccctctgttgggggatggggaggagagcagtctgcccttgggagcgtaggccccagggagacttctaaagccccccctgtcgtctgctcttcacccagcaccacagaggcacctgctgcacacacaagcatctcactcggcccacggagggggccaggcttcctttgcctgaagctgttttgggaagggtctccacacaggcactgatctcccaagctttggtcatgatgtcttttaccatttgataattttaaacattgtttttaaacccaaaacatttagtggtccgttgcctctgaagatgtaaacaaacaaatacactatttctgggaacatttatattgagattctttgtggctattggtgtgtctcacaggcaaaatttgatttggctaaaataggctcagatgtatttgtgtgcccgtgtgtgtgtgtgtgtgtgtgtgtgtgtgtgtgtgtgtatgagagagagagagactttgacggttgtagatattttttccgctttgcctactttatgttgtataatcatgtgtttactaacaagttgatgacatggatgtattcataagaccatgtaatattgatgtgattgttgccgcttgagaaaaaaaggcaacagctgattctttcaacaactgtcacagaatggctgggctgagaacgctgcccagggccctgcagctggcgggagaggtgtctggtgggagcggtgtctggtgcgtcagcctgctgcttcgtgtctcactcgagagttgcttctggtttcacactttttaacccctctgtgctttagcagccgtgaccttgccttcattgcttcatccagtgcaggcctgggttattgaagacaccaaagtgtttctcttccagtttgaaaaccaggcaggtttacacgtgggtttcagtgtatttgcctttgaacccttcaaactaaactttagccttttggctggtgttgaatgtctttagctggggtgacctggagtgacctgggacggtgttgtggtttaccgtctccagcttcagcctttccagaaacccttgtggagggcagtgttggctgcaggtttcatcatattgcagtttgaggtcaccactatttggggaacaagcttgcgtcctgctgaggggcaggattttcagcagagcgtcggtggggctgggccgtcgtggaggtggccccaggagtcatatggccatactcagacacaccttgtgtggcctgctcagagctggatgccacctttaggcaatgtttagagtctattttctaaagttttaagtattttaagaggtattgagactaatgaatataatagttcagtaatttaaatgcttatttattttcagtggaaggatttttattaaaaagaagctaattgacatggaaatgtcagtgaaatttcttacctgcaaggaaagtgaacattttgtatttaagtaaactataatgtgcacattttaataaagaaatctgacatttgaaaaaaaaaaaaaaaaaaaaaaaaaaaaaattgcaaggaccattaaacaatagttttgcctttaaagttaagtttacaagataaaagaggcaagtattgaaactttgctttaatgaactgataccactaagtctgcagatgaagaaactttgacagattccctaaactgcaggaaaattatcagcaatgatgtatatgtcctttctaaatgtgagaacacagtttactaagtatcctaattaaagaattcttgtgttcttttactcaataacacattaaaaaggggttaaaaa

SEQ ID NO: 7451 - DNA, 4595 bp, Homo sapiens
  misc_feature (1912)..(1926): n is a, c, g, or t
ggcacgagccgagaagcgcccctcggcccccacgcagcggaggcgcggagtggcgggactgctgctctttgtgggtgcagcacgcacgacccggagcgccctccccgcggcgctgtccccggcgtcttcgtcgcgccgagcggccctggagcggggacccggaggaagcaaaaccacgagcccgaaacctcgcgtggcggagctcttggggagctccgccacgcgaggtttcgggctcgtggttttgcttcctccggccaaggtccccgccgctgcatccctcgcggcttcccgtgcgctccgggccggagccgagccgcctgcgctgccacagccagcgcctccacacactcgcagacgctcacacgctctccctccctgttcccccgccccctccccagctccttgatctctgggtctgttttattactcctggtgcgagtcccgcggactccggcccgctatttgtcatcagctcgctctccattggcggggagcggagagcagcgaagaagggggtggggaggggaggggaagggaagggggtggaaactgcctggagccgtttctccgcgccgctgttggtgctgccgctgcctcctcctcctccgccgccgccgccgccgccgccgcctcctccggctcttcgctcggcccctctccgcctccatgtgccggatagcgggagcgctgcggaccctgctgccgctgctggcggccctgcttcaggcgtctgtagaggcttctggtgaaatcgcattatgcaagactggatttcctgaagatgtttacagtgcagtcttatcgaaggatgtgcatgaaggacagcctcttctcaatgtgaagtttagcaactgcaatggaaaaagaaaagtacaatatgagagcagtgagcctgcagattttaaggtggatgaagatggcatggtgtatgccgtgagaagctttccactctcttctgagcatgccaagttcctgatatatgcccaagacaaagagacccaggaaaagtggcaagtggcagtaaaattgagcctgaagccaaccttaactgaggagtcagtgaaggagtcagcagaagttgaagaaatagtgttcccaagacaattcagtaagcacagtggccacctacaaaggcagaagagagactgggtcatccctccaatcaacttgccagaaaactccaggggaccttttcctcaagagcttgtcaggatcaggtctgatagagataaaaacctttcactgcggtacagtgtaactgggccaggagctgaccagcctccaactggtatcttcattatcaaccccatctcgggtcagctgtcggtgacaaagcccctggatcgcgagcagatagcccggtttcatttgagggcacatgcagtagatattaatggaaatcaagtggagaaccccattgacattgtcatcaatgttattgacatgaatgacaacagacctgagttcttacaccaggtttggaatgggacagttcctgagggatcaaagcctggaacatatgtgatgaccgtaacagcaattgatgctgacgatcccaatgccctcaatgggatgttgaggtacagaatcgtgtctcaggctccaagcaccccttcacccaacatgtttacaatcaacaatgagactggtgacatcatcacagtggcagctggacttgatcgagaaaaagtgcaacagtatacgttaataattcaagctacagacatggaaggcaatcccacatatggcctttcaaacacagccacggccgtcatcacagtgacagatgtcaatgacaatcctccagagtttactgccatgacgttttatggtgaagttcctgagaacagggtagacatcatagtagctaatctaactgtgaccgataaggatcaaccccatacaccannnnnnnnnnnnnnntacagaatcagtggcggagatcctactggacggttcgccatccagaccgacccaaacagcaacgacgggttagtcaccgtggtcaaaccaatcgactttgaaacaaataggatgtttgtccttactgttgctgcagaaaatcaagtgccattagccaagggaattcagcacccgcctcagtcaactgcaaccgtgtctgttacagttattgacgtaaatgaaaacccttattttgcccccaatcctaagatcattcgccaagaagaagggcttcatgccggtaccatgttgacaacattcactgctcaggacccagatcgatatatgcagcaaaatattagatacactaaattatctgatcctgccaattggctaaaaatagatcctgtgaatggacaaataactacaattgctgttttggaccgagaatcaccaaatgtgaaaaacaatatatataatgctactttccttgcttctgacaatggaattcctcctatgagtggaacaggaacgctgcagatctatttacttgatattaatgacaatgcccctcaagtgttacctcaagaggcagagacttgcgaaactccagaccccaattcaattaatattacagcacttgattatgacattgatccaaatgctggaccatttgcttttgatcttcctttatctccagtgactattaagagaaattggaccatcactcggcttaatggtgattttgctcagcttaatttaaagataaaatttcttgaagctggtatctatgaagttcccatcataatcacagattcgggtaatcctcccaaatcaaatatttccatcctgcgcgtgaaggtttgccagtgtgactccaacggggactgcacagatgtggacaggattgtgggtgcggggcttggcaccggtgccatcattgccatcctgctctgcatcatcatcctgcttatccttgtgctgatgtttgtggtatggatgaaacgccgggataaagaacgccaggccaaacaacttttaattgatccagaagatgatgtaagagataatattttaaaatatgatgaagaaggtggaggagaagaagaccaggactatgacttgagccagctgcagcagcctgacactgtggagcctgatgccatcaagcctgtgggaatccgacgaatggatgaaagacccatccacgctgagccccagtatccggtccgatctgcagccccacaccctggagacattggggacttcattaatgagggccttaaagcggctgacaatgaccccacagctccaccatatgactccctgttagtgtttgactatgaaggcagtggctccactgctgggtccttgagctcccttaattcctcaagtagtggtggtgagcaggactatgattacctgaacgactgggggccacggttcaagaaacttgctgacatgtatggtggaggtgatgactgaacttcagggtgaacttggtttttggacaagtacaaacaatttcaactgatattcccaaaaagcattcagaagctaggctttaactttgtagtctactagcacagtgcttgctggaggctttggcataggctgcaaaccaatttgggctcagagggaatatcagtgatccatactgtttggaaaaacactgagctcagttacacttgaattttacagtacagaagcactgggattttatgtgcctttttgtacctttttcagattggaattagttttctgtttaaggctttaatggtactgatttctgaaacgataagtaaaagacaaaatattttgtggtgggagcagtaagttaaaccatgatatgcttcaacacgcttttgttacattgcatttgcttttattaaaatacaaaattaaacaaacaaaaaaactcatggagcgattttattatcttgggggatgagaccatgagattggaaaatgtacattacttctagttttagactttagtttgttttttttttttttcactaaaatcttaaaacttactcagctggttgcaaataaagggagttttcatatcaccaatttgtagcaaaattgaattttttcataaactagaatgttagacacattttggtcttaatccatgtacacttttttatttctgtatttttccacttcactgtaaaaatagtatgtgtacataatgttttattggcatagtctatggagaagtgcagaaacttcagaacatgtgtatgtattatttggactatggattcaggttttttgcatgtttatatctttcgttatggataaagtatttacaaaacagtgacatttgattcaattgttgagctgtagttagaatactcaatttttaatttttttaatttttttattttttattttctttttggtttggggagggagaaaagttcttagcacaaatgttttacataatttgtaccaaaaaaaaaaaaaaggaaaggaaagaaaggggtggcctgacactggtggcactactaagtgtgtgtttttttaaaaaaaaaatggaaaaaaaaaagcttttaaactggagagacttctgacaacagctttgcctctgtattgtgtaccagaatataaatgatacacctctgaccccagcgttctgaataaaatgctaattttggataaaaaaaaaaaaaaaattcccg

SEQ ID NO: 7452 - DNA, 3890 bp, Homo sapiens
  misc_feature (431)..(446): n is a, c, g, or t
gaatggctccgcagatggccggcactgagagccagcaagaagcggaggagatgggccttcagcagggggttgcggggggagctttaaactgagccctgtaaacatggcagaactgctcagtgggagactctcagcacagacggtcatggggaagtgagtgcagttcatttgtaatcttgttgtcgagttctgggttttttttgtttgtttcgtaactttaaaggtatgcactttatatagatttatttatttgctgggaccgttactcagagttcctagaaatgtacacagcttttttaccagggttactcctcagaatcacttgtcacttctttaaatgaatgaatgaatgtgccaggccctatgcctggaggttgggagcttcatctacatcacattctaacaggtgaccactggggtaagcactgtgnnnnnnnnnnnnnnnngtgtgtttccatcaacacccagatgaccgtgcctatgtgcccctgttgtcctccctccaggactgcctcctcaccccacccctttctgcagctcctcatctaaacatctcgcctggtgaggtcacggcttagcctgttggccagtggccccaccaccatccttccccctgtgcagattggaggaggccaggtctctccccttagctcctatgtccccttcaccccccatggcacagatgagacattcacagagtttgcagatgatggaagagaagactccaggttgccaggtgtgtccactctcaggaacccccagcccaagcctcactgctcgtgttcccagccaaccccagcacgggggatacgccggtgctgtttccctgctcagatacaaccagttaccagaaacgacctcacccctccaaccactttccaaggtgccaggacagagaagcccttcactggcccacccagggcagttgacagagggatgccctccttggaggggagcctcacctctacccacagggccgcggccttgtcctggattctcaccggggcagtcacgtcaggatggagaggtcccatgtcagccagttctttggtgggggtcatgtagtctgaaatgacctgccgatggtccaggctgagccagggaagctgagcctgggtgcctttttggtgcctactctgacttgagttggattcatgccacagacccaccttcttgagcaacaacacatatagccaccaacacaagagccaggcacacactgagcagagaaagtccctgtcgcctcaccacccaaaaactccagctttgcagagaccaaggttcttctctacctttgcagaagcctctgtgaccaaacccggagcttgcccttctgaggcctctagcatttctccaggtgtttttcagaggacttggtttaaatttgttcaccccaaatgtggtctttcccggatcatgaaaggatctgccgcaaaggtgaatctgagtctcctcagagtcatatgagactgaaactgcttataacatttccgtgacctaataagtcttccaaaaatgtagggtattaagagtttagtgacattaaaaagtttagtcgaaaatatcgtgattcaggtatatttagacatttgattcatgccaaattgccactgttaacagaaaacacaccccaagcacattaatgcctagatatttcaaacccttttctgcccacacattcttaaaaataatatactgagaaatctatatacaggtttttttttaattagcttggaaaagagcagttgtattctgtttgaacagctgctaatgtcaattcctgtgggaagaaagaccaaagaacatggagttacaccaagaattttaaaacaaagacgctgtccctttcctgagcaccgtgcagccaagactgagagatcagtctgagacctgtgattaaggagtgttttctacatagcgtataattatggagccacacaagtgggccattactctgttgagtgcttcatgtttgaggtattttcgtgttccaacttacattaaagtgtttataaaacaggaaaaatccacgagcaggtattgacactatccatattagatcatcacaaaattatatatatagcagagtcataaacaatgagaaacggtcttcccacacttgctttaaatggccatgacctagtgtttagggaaagcagtaaaatcagcgaggagctcgtgggaaaaatgagacgggccctgagggggtgactcatgggccaagcagggccacacaggtaccaggccgccacgtcctctcctgcctctcactctctggagactggacttcctttactgcctcctttctgacatttcctagacatcagactttgctacttagtacacaaacggggttcccttttaaatttgttcactctagttagcatttgcagaagctgtgaaaaattacagagagatgatgtgttgggtaagagatggtttaaaagtccagcttgctgtttttcattaagtgtcttgaaaatgagtaagtggcgttcctggaggggaacaatcatataattccgcagggtgggtctaaacttgttttctgatagtgtttagcagctcatggctctgagggcacctgataacacagcagccaggcgctgatgagaagtgtgtgccagacagacccgagtgtggcttggctcttgccttatgttcctttctctgttcagagaagcgtgagatgagattttgtgattatattgcactccttgggctgactttcccatgcacagaatgttttacacatcctgatagctgagctgaaaatgcaaagagaagggaaaatgccttaaattgttctggctaatttagaagcagcaggccttggaagtctttgtcctgtgtccctgaacaaatcttatgggagctctggtacctatgccagaaaatgcacataggcacaacacttttacatacacgttcacacaccccacccttatggagaacttttttctaaataagagaaagaaaaattttaagacttacaagttatgtttaggtattttacatggttcagaaaacaagacatgaagcggtataaactgagaagtcttgttcccacaaccccacgtgccaggtacacataaccatttttattcacctctagcttgtgcttccaatgtttgttaggcatatgtaaataagtgaatagataagcatttctccctccttttgctgacatgagtggtggcatgttttgcccctggcttttatcccttgaccccattccagtacctagagacctgcttcatttttttagatgtgtaatacttcatgtgtgcgtgtgccttagtgattaactcgtgcactgtgcagggacatcgggctgggatcagtttgttcactgatatatacagcgctgcgggagataccctcacatgtgtatcatttggtccatgtgcaggtgtgtctggaagatagaattctaggcgtagaattgataggttaaatgtatttatagggaaaaaatcaatataaaactttgcgtgtaatgatatttgcgtgcttttttttttaatttttttacccaaatagtaaaaaaaaaaaaaaaaaaaaagaagaaacaaatgtgtggggggggagacggacctccggggaaaaggctctctatcacacacaactctcgttgggagccccgggcgccccaggagggggcaatgacacacaggttggagcctgaagcggtgaccccgaagagagatccgtgcggcccagaaccacacgcggggagagatcacccacgaaagtaaaaaagagccccgcggggggcacacacagcgtgctgtgggtggaacaaccctgagaagcaggctgagagaggcaaacggggagctcgttccaagggaggccaaggagccggtttaaaccaggcgcggcgaggg

SEQ ID NO: 7453 - DNA, 451 bp, Homo sapiens
tttttttttttttttttgcttttcaaaattttttttaatagttaactaagttaggaaaaagttaccatcttcatcaaatacttaaaattgtaaagcaaaatatatggaatagaaaatggcattcgttcacgtcagacacttgtgatgataaagtatggtactctgtgagtggactgatgaccaaggcagatgtgtacagatgctaaactgttgggaaaatgctgcttatgagacatctctgcttcttgagacctgaatctgcaaatgttgagcactgtaccttacaaaagccaacagtttcttggcacagagtgtaaaagtttcatgggttagaatgttggtgaaattgtacactcagtacctgaatttaaactttaggagctcagtatgtatattaaccactttccttctcaagggatgccattcctttcttcattcatgaggaattttc

SEQ ID NO: 7454 - DNA, 1528 bp, Homo sapiens
  misc_feature (69)..(83): n is a, c, g, or t
  misc_feature (625)..(657): n is a, c, g, or t
gaaacctggtaaactcctgactggaaggggcaaggggtgggcgagatcaggaatcctaagaaaaaggcnnnnnnnnnnnnnnntttctgcctaaccacttcccgctgccacgcagttttatccggtaaagcgaatgattagaggtcttggggccgaagcgatctcaacctattctcaaactttaaatgggtaagaagcccggagatggactcggatgaggacgactcagaggagctcgaggaggacgacggccatggtgcagagcaggcggccgcgttccccacagaggacagcaggacttccaaggagagcatgtcggaggctgatcgcgcccagaagatggacggggagtccgaggaggagcaggagtccgtggacaccggggaggaggaggaaggcggtgacgagtctgacctgagttcggaatccagcattaagaagaaatttctcaagaggaaaggaaagaccgacagtccctggatcaagccagccaggaaaaggaggcggagaagtagaaagaagcccagcggtgccctcggttctgagtcgtataagtcatctgcaggaagcgctgagcagacggcaccaggagacagcacagggtacatggaagtttctctggacnnnnnnnnnnnnnnnnnnnnnnnnnnnnnnnnntcacaagcagaagggttggccaacggtccagatgtgctggagacagacggcctccaggaagtgcctctctgcagctgccggatggaaacaccgaagagtcgagagatcaccacactggtcaacaaccagtagcatggttacagaagagcgtggaccatgaattgggccggtgcacaaacagcgtggtcaagtatgagctgatgcgcccctccaacaaggccccgctcctcgtgctgtgtgaagaccaccggggccgcatggtgaagcaccagtgctgtcctggctgtggctacttctgcacagcgggtaattttatggagtgtcagcccgagagcagcatctctcaccgtattccacaaagactggtgcctctcgcaggtcaataacgccagctattgtcgccacgtgtggggaggagagctccaaggacaaagaggtgacgatcagctaagagcagaagcagctcgaccgtgacaacagtcccgggcaggagaaggctcggccctggagggcagggcggaaacacaacgggcagtgctgccggacacatccacggacggaagaacagtgacggtgcagctcccaagtgccgaaggcgttgaatccaagggactgtggcttgggagcacatccggcatacgcaggccgtggactcgtcacctgggcagcatctatgtgccagtaatgtggatagccaaagacgctgtctccaaaaaacagtacttctccaggaggacgcagaacggcccacgcggagagaatcacgatatggccaaaatgcctgagacgggcgacagaactaacagcgagcataagcagagccgggaaagaaactgcgctttgctcacggcgacgttgcctcatctacatg

SEQ ID NO: 7455 - DNA, 1185 bp, Homo sapiens
ttttatgcaattttagaaatggggcagggaaacaaaatgtggtcattcatcagtcacttagtcattgagccttttatattgtacctggaaattaaattccagcaatgacaaaagttttgtgtattcattaaaagaaaactaactggaaaacaggttagattaattcagtactattaaaaaagaattcagagctgttaatattttatcacaggataggatacttaaaatatagcattctgtgctgagatctaaggtgaagtctataaagattaaagttcccttttttctgatgttcaagttgattgttgttcagtatggcatatatgacaaaagtatatttgagtcaaatgtggctttctaaaatggatgcaacattagcgttgcaaacaaaatcagcactatatttcttaatgatctaaagattaatttgagagaacacagttttcttaaatattataatgtctagagtttttttaggacagtcttagcaagtatgattgttctagtcttacttgctctaatgtttaaaggtgcaattttatgccattattgaaattgatttttaaaatctatataccatatgattaacatgcattttcaatatgaggcagtgtttatgcagtatttaacagagcaatctgctgccaatagagtttggaggtggatatttagtttacagtgtataaacttaaaatatgcatccctttaacaacgctttgtgttagcatgctgcaaatcaaaatggcacttaatattaaaagctggtttagggaaattttatgaaaatcctgttcataaatgtaatgcatatgatatgtacttttaagttttagttgcttcatgtttacattcagctgttcaacataattaaaatgtaattttacttcatgctatattgtggctttgtgtttcaaataatgttcacctttctgtttttgcaccagataagaatcagttccttgagaataaattttttatctttcttaacttcagaatattaaatttggaatatctactaaaattgtgtgttatgtggctgtaaatgatgtacacgctgtaaaataagatcgctactgttatgtgggattattatttctaaatgttactcattgaaatgagcatacaataaaaagcatttattgcaaaaaaaaaaaaaaaaaaaatatttaaagtttccatattttt

SEQ ID NO: 7456 - DNA, 745 bp, Homo sapiens
  misc_feature (667)..(686): n is a, c, g, or t
aaggcaagtttattaaaaaagtaaaggaataaagaatggctactctataagcagaacagctcaactagcatggtttctatcccctaactagactccaacgaatgcaagagggataatagcatctacctcctaatacaacactaatacttattatcattagtatattaggctacagaagccaaaagcagaaattaagaaatgttatggtcagtagaatcaaatatacaaggatattggattaggttattgttgttggtctttcagagcaaagttttaaaatctgatttgagaaaaacctcccagcatgcacacacagccggactctcagaaaatgtttcctttttagtcaattcctacatggatgccatgcaaaaccactccatctatcaagctgtcagaatgaactgctaaattcttaatagtctcattcacacaaaatgtccccacagtccagtgcatctggagggtctggccttgacttgctaaatgcaggcacattcagatagccttcagaggtccccataacagcactggtgtctacaaacagggaatctatacatgtgagagggacaaggaaggtctccgggaggttaaacgaaggaagggaccaccccaaacttttcatgcttcagatgaagatgctgagaccctagagataaaggaactnnnnnnnnnnnnnnnnnnnnccaaagtcacggccaacaacagcatcaagcttcctaactcctctagcacccaaactccc

SEQ ID NO: 7457 - DNA, 2032 bp, Homo sapiens
tacagtttaggaaatataggctttcaaagataattcgcagtgatgtgaaactggcctcccaagccctgataagtaagttaaataagagtaggagccaggagggaggttctttactcttgaattaagagaaggggagctggaggtggctcaggtagagtgcgtaggtttgcagaactgggcctgtgtgtgtaaagtgactaaggcaaaggagtggaagtttgagagaagtttaagagaagaaatggacatgattgcctaaatcagccaaacacaggcaacatggccaacgccctggccagcgccacttgcgagcgctgcaagggcggctttgcgcccgctgagaagatcgtgaacagtaatggggagctgtaccatgagcagtgtttcgtgtgcgctcagtgcttccagcagttcccagaaggactcttctatgagtttgaaggaagaaagtactgtgaacatgactttcagatgctctttgccccttgctgtcatcagtgtggtgaattcaccattggccgagttatcaaagccatgaataacagctggcatccggagtgcttccgctgtgacctctgccaggaagttctggcagatatcgggtttgtcaagaatgctgggagacacctgtgtcgcccctgtcataatcgtgagaaagccagaggccttgggaaatacatctgccagaaatgccatgctatcatcgatgagcagcctctgatattcaagaacgacccctaccatccagaccatttcaactgcgccaactgcgggaaggagctgactgccgatgcacgggagctgaaaggggagctatactgcctcccatgccatgataaaatgggggtccccatctgtggtgcttgccgacggcccatcgaagggcgcgtggtgaacgctatgggcaagcagtggcatgtggagcattttgtttgtgccaagtgtgagaaaccctttcttggacatcgccattatgagaggaaaggcctggcatattgtgaaactcactataaccagctatttggtgatgtttgcttccactgcaatcgtgttatagaaggtggtgtggtctctgctcttaataaggcctggtgcgtgaactgctttgcctgttctacctgcaacactaaattaacactcaagaataagtttgtggagtttgacatgaagccagtctgtaagaagtgctatgagaaatttccattggagctgaagaaaagacttaagaaactagctgagaccttaggaaggaaataagttcctttattttttcttttctatgcaagataagagattaccaacattacttgtcttgatctacccatatttaaagctatatctcaaagcagttgagagaagaggacctatatgaatggttttatgtcatttttttaattaaaaaagaaaaattcatataatcgtgtttaaaacacaaatgaagtcagtatttgcctttgttaacccttatccatttgttgacatgtagactgtttacaaaaaaaaaacacatggttaaatgttaaattttaattaaggcccccaaaaattaaatataactttttaaaatgaaaggagtcaccttttacatgactcaggtgaaaaaacagtataaacattaatttactttgtgttcaaaagaaaattccaactgctgttggggaaggacacagaaaagaaaaataaccacccaaaaaaaaaaaaaaaaaaaaaaaaaaaaaacactttggggccccccttgggccccgaaaaagacttttcgagaacccatcctgcgttgggggcgcgcggggccccgtagggtcaggtggaaccgtgcgcccaaaggggtccccagaggaaaacccggggccaaacacaaagagggccgggagatttccgccaccacaataaaaaaaaggcgccgcgggggcgaaaccggcaccctctcgcggaacaaatctcccaagaagggggatccgcggacagggcactacaggggcctcttcacacggggagctcccagcgaaaagccgccgaaacctcaaaatagccc

SEQ ID NO: 7458 - DNA, 4135 bp, Homo sapiens
  misc_feature (917)..(938): n is a, c, g, or t
  misc_feature (1230)..(1232): n is a, c, g, or t
  misc_feature (1236)..(1293): n is a, c, g, or t
  misc_feature (3553)..(3553): n is a, c, g, or t
  misc_feature (3620)..(3620): n is a, c, g, or t
  misc_feature (3643)..(3643): n is a, c, g, or t
  misc_feature (3651)..(3651): n is a, c, g, or t
  misc_feature (4105)..(4105): n is a, c, g, or t
actcgcgcgctgcgctggcctcctccccgccccgggcccaggcgcgctttttttttttttttttttttttttttttttcccctccctccctgcctctctctctctccctctccctcgagctcccggctggctgcggctccctggcgctctccctctctctccggtaggctcaccgagcgatgcgagctctgggagacagcgacgccgcctcccgctagagacctgcccctcggcccggccccctgcccaaccctgcccagcgcgcgggggtcggcgaaggcgccgcggacgcaccgacggctgaagagcggcgatgcacatgcactagcagcaccccctaactcactccctccacatcccgcgccgccgccgccgcctcctccacctcctcctccgccgccgccgcctcctcctcctccggcagccgcggcagcaggacccaccctgccccccaccccaccctctgtcggctccggctgcggctccagcctcgactattattttatttattttgggtcgtgcacaagcctcagtgcctgcagtccgcgcctcctcggcccgcgggcgcctcctcccttggctccggagccccagaccccggccaccctcgattcgacaaccccagacccctgccagctgccgcgagtctccgctgctggaatcttgttagcggctgtctttttggagggttctggtttcccgacatttttgtttccagcccaggagaggatatcgtgattttccccccttgagcccaggctctgctctctgggggggtggggggcgctccaagccggggagccgtgccagccgagtcgtgcgggctgtggcagggaaggggccaccatgggatgtactctgagcgcagaggagagagccgccctcgagcggagcaaggcgattgagaaaaacctctnnnnnnnnnnnnnnnnnnnnnncagagacgtgaaattactcctgctcggggctggagaatcaggaaaaagcaccattgtgaagcagatgaagatcatccatgaagatggcttctccggagaagacgtgaaacagtacaagcctgttgtctacagcaacactatccagtccctggcagccatcgtccgggccatggacactttgggcatcgaatatggtgataaggagagaaaggctgacgccaagatggtgtgtgatgtggtgagtcggatggaagacaccgagcccttctctgcagagctgctttctaccatnnngcgnnnnnnnnnnnnnnnnnnnnnnnnnnnnnnnnnnnnnnnnnnnnnnnnnnnnnnnnnnaacggctctgccaaatactacctggacagcctggatcggattggggccgccgactaccagcccaccgagcaggacatcctccgaaccagggtcaaaaccactggcatcgtagaaacccacttcacattcaagaacctccacttcaggctgtttgacgtcggaggccagcgatctgaacgcaagaagtggatccattgcttcgaggacgtcacggccatcattttctgtgtcgcgctcagcggctatgaccaggtgctccacgaagacgaaaccacgaaccgcatgcacgagtctctcatgctcttcgactccatctgtaacaacaagttcttcatcgatacctccatcattctcttcctcaacaagaaagatctctttggcgagaagatcaagaagtcacctttgaccatctgctttcctgaatacacaggccccaatacctatgaagacgcagccgcctacatccaagcacaatttgaaagcaaaaaccgctcacccaacaaagaaatatattgtcacatgacttgtgccacagacacgaataacatccaggtggtgttcgacgccgtcaccgacatcatcattgccaacaacctccggggctgcggcttgtactgacctcttgtcctgtatagcaacctatttgactgcttcacggactctttgctgttgacgttgatctcctggtagcatgaccttttggcctttgtaagacacacagcctttctgtatcaagcccctgtctaacctacgaccccagagtgactgacggctgtgtatttctgtagaatgctgtagaatccggttttagttgagtcttcacatttagaatttgaaaggaaaaacagaacatttctcatgtgctttgtagcttaaaaaaaggaaaactcaccatttcatccatatttctttttcttgcaaaacaaacatacccatctgcaccgacgcctgcccccgtcccacctcgcggcgcagcccctggagctcctgctggggggcagggcccatctgccgcctggggctccggtgcggtgcactggtccgaggagtgtgctcaggccgggctttccagaaggccacaggccactgcaaaccctgctgcctgccggccgcccagacaccacagacgccacctggcggccctaagccactcccgccacacgctcactccaggttcgtatagaaaaagcacagctctcactggccagtagctgccaaaaagaacacccatcgtataaggaaatccagccccatagaaaacaatctgcccaccgaccccctttctaaggatagcctttgtaggggttttttggttccttttttttttttttcagtttttgtttttacttttgtcccgccgagtactatgtattaccagccccccaccccacagatcagttttcctagtctttgggaaacgggttgtgttttttttcctttgccgtgttggatttccggtcccggctgacacctcccttcgtgtgtgcgcccctccccacccctgcctttgtttcggtgccctgtgtccgctctctcatgtggggatgtttgtgctgcagacaaaaagaacaaaaaaaaatttttaaataccacaagatggaaaaaaaaaacaaaaaaatttaaaaagatggaatgtagtgtttacattaaagccgccgttttcatgaccaatcctatgtcatttctactttgactaatacccaaaccctaaacctcttcacggtttcacttttaagacttaatctttgctgaagaagaccagtcacagccatttcaaataaagaggaggcaaaaagacaaaacacacaaaaaattaaaaaaaaaaacttaaaaaaaaaaggaaaaaagaaaaaaaagcccacgggtctttgtaagcctttctattcccaatcggtgaggtttctgtgatatcttacacactgccagtctacttctctgactaatggaaaattcctgtgtagctcaataaaagagaatgtttgtctgcaaaaaaaaaaaaaactttatctcccccacccccccaaccccccctaatcactcccaccacatttcaacaaatacactaacaaaaagcaaataaccaacgggggggctgcgcttttctctccatatttacatcccgcctaataggcggcctcacacaacgccttctacctgtatttccccccccgctccctttatttttatacacaaaaaacaaaacggacggttcctctctaaattgttgcccgccccgcaaccccaccaaatattattattntataaaccattttctaatcgcaaacccaatttatgggagccgcctaggtccccttggccaatacctngctatctccacaacccgaagacntcccctancattccagtgatagtttttggatggtgaaaaaaatcaccctaccctctgagcataatacacttacatctgtggaggcgcccccactatttgtttttgttttgtgcccccaccccggcgaggatgttacagcacccgataacgccaccccccctaacggggagggcggcccggccaggaccccaattattaggaatatatttggggtgccagcttatcaaatacgggccgtctttttttttttttctggcggccgccccagtctttctcccgggggcctcttctccgcaacaaatgggagaccccccccccaccaagacaaaaataatacttagattataagaacgggagcgattcacaaccacccctgggtccccccaccgtgacccactgtaacctcaccaggacaaaagacgcgcaactcgagaggggacctcccctttttttaaatggttngatcaactgtttatataccaaaccagacat

SEQ ID NO: 7459 - DNA, 1932 bp, Homo sapiens
  misc_feature (162)..(162): n is a, c, g, or t
ccgcgctcgcagggccgtgccacctgcccgcccgcccgctcgctcgctcgcccgccgcgccgcgctgccgaccgccagcatgctgccgagagtgggctgccccgcgctgccgctgccgccgccgccgctgctgccgctgctgccgctgctgctgctgcaacngggcgcgagtggcggcggcggcggggcgcgcgcggaggtgctgttccgctgcccgccctgcacacccgagcgcctggccgcctgcaggcccccgccggttgcgccgcccgccgcggtggccgcagtggccggagggcccgcatgcaatgcgcggagtcgtccgggagcagggctgcggctgctgctcggtgtgcgcacggctggagggcgaggcgtgcggcgtctacaccccgcgctgcgccaggggctgcgctgctatccccacccgggctccgagctgcccctgcaggcgctggtcatgggcgagggcacttgtgagaagcgccgggacgccgagtatggcgccagcccggagcaggttgcagacaatggcgatgaccactcagaaggaggcctggtggagaaccacgtggacagcaccatgaacatgttgggcgggggaggcagtgctggccggaagcccctcaagtcgggtatgaaggagctggccgtgttccgggagaaggtcactgagcagcaccggcagatgggcaagggtggcaagcatcaccttggcctggaggagcccaagaagctgcgaccaccccctgccaggactccctgccaacaggaactggaccaggtcctggagcggatctccaccatgcgccttccggatgagcggggccctctggagcacctctactccctgcacatccccaactgtgacaagcatggcctgtacaacctcaaacagtgcaagatgtctctgaacgggcagcgtggggagtgctggtgtgtgaaccccaacaccgggaagctgatccagggagcccccaccatccggggggaccccgagtgtcatctcttctacaatgagcagcaggaggctcgcggggtgcacacccagcggatgcagtagaccgcagccagccggtgcctggcgcccctgccccccgcccctctccaaacaccggcagaaaacggagagtgcttgggtggtgggtgctggaggattttccagttctgacacacgtatttatatttggaaagagaccagcaccgagctcggcacctccccggcctctctcttcccagctgcagatgccacacctgctccttcttgctttccccgggggaggaagggggttgtggtcggggagctggggtacaggtttggggagggggaagagaaatttttatttttgaacccctgtgtcccttttgcataagattaaaggaaggaaaagtaaaaaaaaaaaaaaaaaaaaaaagaaacagcacagccacgcacaagacagaaaaccacaaacgcgacaaagagaaaaaaacaaccaagagccacgaaaaagcgaacaacgcaacacagcgagggggagggcgcgcccactagaagacccgccccagggcgggcgacaacaacagacacgccacgaccgaccctgatgcgcgaacaacagcgggcagccgacacaacgacagcgcccccaatacacaaacgcagcggaccagccagcaccaacacaccgccgagagagagggggcaaagaaacaccgagcacacagaagggcgaaaaccaggagagccgcacagccccccccactccggcgagggggcgagcacaacagcagagagagcacagcacacacacacgagcgaagagaaaacgccagagcaggagggaagagaacaaaacagcgggaggacgcaacggcggcaacaccaccagtcgtgtaggcgcgcgcagcacaaaatgaaacagagagcgacaacaaacgagaaaaaatagg

SEQ ID NO: 7460 - DNA, 783 bp, Homo sapiens
gactctacaggatcgttaatcggtcggacaagcaaggagaacggacagctcacgcttaagacccaaactccccagtggcttacaagctggggtttttaggggtatgggtacatttcaggaaagcagaagttgcaggcaaaatcattaaccaatacatggggtgtcatgagcagtgcaaagttagagataatcacatccaagcatgcctgtgtctttcacaatgtcagaattttattgaggctatttcaatccctaaagccacgagccacacggcgttcccaaggaggcatgctgcttagtgctcctttccctcagtagtgagagctgcggtcacacgggctcaagccactgcacatgtcagccaatattgcacacgacaacgtaatagtgtacttaatcagtatatacatgttacaggttaacgttccacaacaaagaaagtagcatttaacatccagaggaaacagagataggagaaagggttcacgaaccagtccaggagagtgaagaagacacaagaagaagacagaaacctcctggtctgggccagtctgtggatcttgcaaggatgtcttcgaggtggtggagcctcaggcggcagatggtgagttctgctggggcctttccttctttgttggccaagtgccctgtaagatatacaatggagtctctaagatggagttagttatgccaagggtgctgtgtgcatgggggcacacattagtggctcacagctgtgactccctccaggcccctcaagaagaaattcatgacagagaacac

SEQ ID NO: 7461 - DNA, 4206 bp, Homo sapiens
tttcttcaacagtaaccctagttttatacatgttttaaaaaaagattctaaaattctttttttttttttttttttacattttatgttttcagttatttaatagttttaacaattactttacacagaacccccaaattgtccacaaacaccataggtacctcattttgaaaaggatatttttgataaagatgactagctaagaaataaagcaagaaaagcaacacccaaaatgtgtgcccctagctcattctggaggtatttagtggacagtctctcttgaatcctaagcaggctggtcatgcttggcccagaattcccaaataatgatttgcgtctgaaatttcccataaggttttgcaatgttccactcatacctatgacagtccagaacaatactaatccagaagcatttttaggtaattgagagtacattttttaaacacaatctatgcacaatacagtgattaggcatattaggggtaaagagctttacaaaacattgctgaaacataattgcgagtctgaatcaaatcaaaaagaccacagaaatattcagtattgtatcttagtttctgttaagtactttcaaaatgtatttaatactaaaagtaattagtagaagagaatttgaattcttgatttttgttctgaaaatttttactctcgatatattaaacaaacatggaaaacttctgtattaaagtcttccacatgtaaaccatttgtcattcattcatatatttttctactttacttctttaccaaaaatcgtgtgatgtctgatccatgctttgatgctagagattgtcttctcacctggcttctttccttagcttgtctggcagttctctctttgtgacagactgtgcagagagtctgcaggttgtccagggaacactgtcctcctcccccatacactggcttgatgtgatccacctgccagaaatgtccttcccctgggtttcttatcatttcatttagctgttctaatgggagctttgaagtccaggtagcatacagaagattcttcctctgacttttaggggcatctctcagacgtaaaaagagttcttgtgcgttcacattacagagctgacacacaccatgttcagtttcaaatactttggctctcaggtaactgttattagatcgaatccaaaactcttcctgacatttcagagagcaaaaccgtgaatcccaagagttcgctttacatgcttgcttagtctggcaagtgggttgctgacagcgaaggcaaagtggatttccttcattatccacagcttgcaaatagcctttggatgtagagggcttcacagtgagatctgcctggactgtgtatggatttagaaatgggacacaggctccatcttcaagaagtttttttgtgaaaggatcccgtggcctggactcctttgtgatcagacggacatggcccccaacattcttcactttgtccattgaggctacggcaacatcttctttggttatgtatcttttggtgcaattttgtttggtttgttgctttgtgatctcttccaaagcaagaattgggctacagaatagctgtccacttttcctgattatcctttgcttcatggcagttagactactccattctcgaacaaatctcaaaatcagtgagcgatattgtttcagctgaaagcttgctggtaaatcttcccaaaggtctaattttatatccagaggaatgaaattacagctcatctgttttccatccttagtatagatgtgaatccggtcagtattcctacttgcacagaacattaaggtgtcatacactggcaaagtgtctgaactcttccactgttcattacctggctgggatgtaagtccgtcttctttctcaatttttggtgtttcttccttgctgtcagccaactggccaggttctgactgtgcaagggcttgtttttcacagtctgagatagtttgaacctttttggaggtgtctttctgagaatcatccttctcgtttttatcctggatatggttgaggctatctatttgcataacagcactgccttgaggagtctcacacatttcacaataaggtaactctgaattattgatataggtgcagagactacattgccagccctctacaggaaaggctggggtggttaactgggccttggcctcctgtacactttccacgagtggagttcggatttgcttggactgggatggtgtctcttccgacggactgcagtggtcttccgaggcagccaatttcaatcttttcgtttcaggttcaacatcactttcataatcgatgatatctcttgcagctgtttttgtagggtctgatgacactacagtattttcctcccggaatctctttgattcgtcacaggaggtcatcaactgtctttttttaggttgtggtacaaaaaatgatcgaatatcatgctgtttttctttttcgaagtgagtgaacaaagcttccttccttaactcttcagaactgtcatttggagtccaagcttcagcaaactgcaggaaatcccatttttccttatcaccttcctcagcctgaattttttctttcctaccgttcagtgtgctccctgtaacttgagccttgcgattcaacattccccacataagggtgtctagggttccatttgcaataaggtagtgaatattcacagaactgcactggccaattctgtgagctcggtcttctgcttgttttatatgtccagggtcccagtacaactcagcaaatacaacatgacttgctgcagtaaatgttaatcccttcaaacttaatcctaagggacaaaacagaagcactccataaaaagtcctgagacaagagttcttttcccccaggccaccttgtcatacaggtcctggccagcagcctgaatgcttaggatagccacgcgagtgtcaggatccttttgaaactgattaaccagatgtattctttctgaagatgaaacacttccatctatcctaatgtaacgagtcttattttcgatgactgcttctgtgcaagcttggagcatgcttaaatggtgagcaaaaaccagaaatttaagcgaatcattctgaagcatcatcttaatataatcctttacagcacctgccttggcaatagcagtttgtttaaacatgcgagttatcaaccccatgactgtctccatggcacctgaatttggagttctcattattttttcccactcttcaaagctggtattcaattccttggcagctgctgatggaagatcaaatggaatacgctgtctgactttagggggtagctgggttaaaacttcagtctttaatcttctaatcattatgtcacttaatagctggtgaagttcattaagatttgatgcccctctacaatcccactgaggtcttttaccaaaatatctgatgtgtgcattacagtatctttttgcatagtcggtccatcttccaaatttttgtggaaagagagcttcaatctgcataaaaagctcttcaggccttcctaaagctggtgttcctgtaagaagaatggctcgtctggctttctgtactattggcaataaaatcctgctgcgagttgcatttctggatttcatgtagtgtgattcatccactataactactttgaagttctgattattcagtgcatctatcaaagtctttgcatctgcggttaagagaccataacccagaactgtcactttactggtcgacattctcctaacatcagttttattctgaataacattgatttcttctggacttagctctgggatccatttttcaatttcttctgtccaagggtacctcagagacgaagggaccactattaacagaggccattcctctttatagaagtaagtaattccaattgcctggattgtctttcctagacccatttcatcagccaccatacacctgccatttcttttgagggcaaaaatgatgccatctttctggaatggaagtagctttgctcttagtctgtaggcaaaaaatccagcagattatcagattcatttgtcacacaagaaatgtgaggtgtaagagacttttttatgttatgaaccctaggcatgatgatccagccacgccacttccagccagtcacacctggcgtattcgccgcagaatctccaactcccgccacaggtttgggacgtgtccgcccctaagcggaagtgacgttcaacgggacaa

SEQ ID NO: 7462 - DNA, 696 bp, Homo sapiens
tgaccagctaatgtttgtttgtttgtttgtttgtttgtttgtttgtttgtttgtttttggagagatgaggttttaccatgttgcccaggctggtctcaaacttgtgagctcaagagatctgcccgcctcaacctcccaaagtgctgggattatatggatgtgagccaccatgcccagcccaatgtctcagactttctgtggttatttttgctttattccaatacctagctgcataatacatctaaaatctatgggagtagcttccagacatgagtatttttcgggaactcttcagatgcctgcacacccggtaagaaactctactctagagaatttatgggtcgactgttccagaagcctcaggagtacagttctgccttttccttgatgctgtttgtagaaagaattggaaaaaaaaaaaaaaagaaaagaaaagaaaaagcaaacagaaagaatcccaatctgccaaatgccttttatgtcaaacgcatttttttcttatctgagaagttttgaaaaagtatagcaattaattattaatatttgccaatgactcacctttactgagattaaaattaatatgaatttattttagaaaactccctatgagtggctatcaaaatattctatgggttatcaaagaaggcaatatcaacaatagtggataggctttaatgacatttttttaaaagtaaa

SEQ ID NO: 7463 - DNA, 737 bp, Homo sapiens
ttttttttttaaggatttaatccaacaaacatttattgagcaactgctgtgtgctatgcaccacgcctagtgctgtgatggatacagatgaataaaacacagtccctgcccttggcaagcttacagtctaagaacagtcaaaggacaagtgcacaaataactataatacaaggcagaatatggtaagtgccatgagaaaggtacaaataaagtgctacggtggttcagcagagggagagatcccagtggttggtacatcagggagggcttcatgaaggacgtggtttccgcatgggctttgaagggaagaaaagggagcattccaggggatggggatagcaagaccaaaggcacagagacagtaaaacgcaggcaccctttccaggaaaaacaactctcctaggctgaccaggggagggtgtaaaggaagaatggggccttatccggtggtctgtaatgtcagaatagagaattgtacatttgttcacgggccggggaacttttaaaggtttgtgtgcaacgggagaggaaaatcactgtgcatgttcaggatggacgggaccacgtgtcagtgtgcacagaggtaatctgggagatgagactgttgctgaaatagtccaagtgacaaagagtcgagattagtgctagtgggaagaattagcaaggcaggacagggaagaatagtcgaagataaccgtcagcatctcagactgggtggctgacgggatcacgggggg

SEQ ID NO: 7464 - DNA, 1068 bp, Homo sapiens
gacgctgggacgcgttgtagctccggccccgccgttccgacccccgccgcgtcgccgcatgacggggctagcactgctctactccggggtcttcgtggccttctgggcctgcgcgctggccgtggtagtctgctacaccattttttattggggcttccgctttgatgtggtatggttcctgacggagacttcgccctttatgtggtccaacttgggcattggcctagctatctccctgtctgtggttggggcagcctggggcatctatattaccggctcctccatcattggtggaggagtgaaggccccccaggattcaagacccaagaacctggtcatgcatcattctttctgtgagggctgtggccattctacggcatcatcattggcaatttgtcattaggcaacattggctgagcctttcatgtgccacagaccccaaggccatcggccatcggaactaccatgcaggctactccatgtttggggctggcctcaccgtaggcctgtctaacctcttctgtggagtctgcgtgggcatcgtgggcagtggggctgccctggccgatgctcagaaccccagcctctttgtaaagattctcatcgtggagatctttggcagcgccattggcctctttggggtcatcgtcgcaattcttcagacctccagagtgaagatgggtgactagatgatatgtgtgggtggggccgtgcctcacttttatttattgctggttttcctgggacagctggagctgtgtcccttagcctttcagaggcttggtgttcagggccctccctgcactcccctcttgctgcgtgttgatttggaggcactgcagtccaggccgagtcctcagtgcggggagcaggctgctgctgctgactctgtgcagtgcgcacctgtgtcccccacctccaccctcaacccatcttcctagtgtttgtgaaataaacttggtatttgtctgggtcaaaaaaaaaaaaaaaaaaatattttatattttctatcttctataaatatatatctctcctctcttctccttttacctaaacaaaataatcacg

SEQ ID NO: 7465 - DNA, 506 bp, Homo sapiens
aggcgagtgaacacattttgaatggaggcatggccactgcttttatttatgacttttcttttgtaaatatattaatacaatgggaaattttttttcctttaattctaacacttgggccctcagtgcttggctgaaggacaggcttaatacctcaatgtccacttccttgcctcggcagagggatgttttaacgcagatgaaattttaaaaggccagctcactgattgctttaaaaatgtgtggaaacgtgtgtattattgacctggtaaattttccttcaaattgaatgcatacaccaccaccgacaacaacaacaagcagctctacatttagaacttagtttcttgaaaacagaccatctcagacttccggctttatcaacacatggcatgagagaaatccgatcaaaagaagaataacaaaataaaagacccaacacctagcacagtgaatgaatccggcctaggagccagacaacttgaattctactacggtatctgtcacaa

SEQ ID NO: 7466 - DNA, 512 bp, Homo sapiens
gtaccaagagtgtactgggtttgctattcatttctaccttgtctattgattatgaataaatgacataataatactttcaaggcccgtgattcacaaaacccagtaacactcttgatattccctatcagtatacagaatcactcaaacattgggtgtttcattaactatcctgttttttatatatgcatcatcaatataatacttcatgtcactcccatatcactggaataacattggccatctttgactgtatttcacacttttaaataatacgttgattactcttaaacaaaccacccaaacaaaggtaaggactttgactattactccccttggtcttcacgctccttcctaagcgtggtgcaaacagagtatgtgaccttggaggcatcctcaaatcagaacaaggacatccattattggtctccatgctcctaataccctgtggcaaccataaggcttctgaccatggaagcgtgcttaaatcagtttaagagcatccattgttggtc

SEQ ID NO: 7467 - DNA, 3112 bp, Homo sapiens
  misc_feature (551)..(570): n is a, c, g, or t
actgcaacagctgcctctcgggttcaagcgattctcctgcctcagcatcccaagtagctgggactacaggcgcccgtcatcacacccggctaatttttgtatttttggtagagatggggtttcactatgttggtcaggctggtctcgaactcctgacctcaggtggtccttccgcctcggcctcccaaagtgctgggattacaggcgtgagccactgcgcctggcctgtatcagttatagtttttgcaaaggcagtttcaggaataagaagcagaaccaggactgcagcccaagccaccacgagaggccagtctttggggatggtcttttaggatgatctttgggggtggcccaaggagccccaggcagctccagaggcaggagtcactcaggatttattgagagcccaccctgtgccacccgctgtgcacagaacacccagagatccctgtccagacagacaagttcttcccatcgtatgttggcgtgataactgtgatggagaaagagaggaagagccagcagtgcctccggctggggaggcggggcannnnnnnnnnnnnnnnnnnnatttgagccccagctggaggggtgccagggcaagagtgcccaggaagagggaagagccagtccacaggcctggagacagaaggctgactgaagaagagtctggaggctcgggtggctgcagcagagaaagcaagggggaggaagccgaggaaggctgtgtttctgactcacacgggggagtcgggggagtcgtaaacaaccctgaagagaacagccaggcctgttcccgcaagcccagacaatgccggtggaggaatttgtggctggctggatctctggtgagacatttttcttccttctgtcacatcacacccaatgggccctgcagttctgcgtggccagctggcagcagggcctgctctggatcccggcgacgacattatgagttgaagaaagaagagtaaagctctcggagagacttgcttcctgggcctggcacgagggccctcactcatagcaccctcttgtcaccacaggcgctctgggcttggtcctgggacacccgtttgacactgtaaaggtgaggctgcagacccagaccacctaccggggcatcgttgattgcatggtcaagatttaccgccatgagtccctcctgggcttcttcaagggaatgagcttccccattgccagcatagctgtggtcaactctgtcctgtttggggtctatagcaacaccctgctggtgctcacggccacctcccaccaggagcggcgggcccagccgcccagctacatgcacatcttcctagcgggctgcaccggggggttcctgcaggcctactgtctggctccttttgacctcatcaaagtccggctacaaaaccagacagagccaagggcccagccagggagccccccaccccggtaccaggggcccgtgcactgtgcagcctccatcttccgggaggaggggccccgggggctgttccgaggagcctgggccctgacgctgagggacacccccacggtggggatctacttcatcacctatgaagggctctgtcgccagtacacaccagaaggccagaatcccagctcagccacggtgctggtggcagggggctttgcaggcattgcttcctgggtggcagccacgcccttagacgtgatcaagtcccggatgcagatggatggactgagacgcagagtgtaccaggggatgctggactgcatggtgagcagcatccggcaggaaggactgggagtcttcttccggggggtcaccatcaacagtgcccgcgcctttcccgtcaatgctgtcaccttcctcagctacgaatatctcctccgctggtggggatgagccctgcggcaatgccagcagctccccatcaggcccacggcctggaggccagtttgagattggaggccaggttgaaagcttgcaaatcagtgcaagaggctcagcccttcctaaccaaggtgcctcccacccgcgcagatctgggctgggcagacacctgtgggagccggaagccagggggcctgtgcagcctccctgtgtagctggccttgactcctttgcctcccacatctgtgaaacagggagcatgaggcacaagtgagctggcaagtggtgctggtgacatcccagctcctgtcctgtgccttcacctctttttttttttttttttttttttgagatggagtctttctctgtcacccaggctggagtgcagtggcgtgatctcggctcactgcaacctccgcctttccaccttccgggttcaggcaactctcctgcctcagcctcccaagtggctgggactgtaggcgcccgccaccacacccagctggatttttgtatttttggtagagacagggtttcgccatgtcggccaggatggtcttgatctcctgactttgtgatccgcccgcgtcggcctctcaaagtgctgggattacaggcgtgagccaccgcgcccggctgccttcacctcttaaggagctctgagactccacttctgagagtccctgcggcctcccacctccctgcctttcaaagctctctcccccatgacccaggataaccctatgtctcctcccccagaatccttcagtggctctcatcaccttcaggaaaagcccaaactccttccaccctccaggttcctccctccccacgaggctttgttctcctggggttgcttcctggaccctgaacaagttgtgctctcattggccgggcctggccagcagtgcacagtgcctggcaggttgactctaccatccccggggctggccccgctctcctccgagacccaggctgagcccagtcccctcacccttccttgacttacctccccacctgaggctgactttggggttcccagacaccctacccacacacatgccttgatcatagcacttgcctgcgcttcttcagagtcattaatttgcttctcggcttccccactggactgtgagctgcctgaggtcagggattgcgctttggatggtttccagcctgagcctggtgcttgaacagacgtgtgcaataaatgctcgttaaatgatgaaaaaaaaaagtgaaaaaaca

SEQ ID NO: 7468 - DNA, 8065 bp, Homo sapiens
  misc_feature (656)..(702): n is a, c, g, or t
  misc_feature (5061)..(5075): n is a, c, g, or t
catggcgcacgctggcggtggcagcggtggcagcggtgccggcggccccgcgggccgggggctgagcggcgcccgctggggtcgctcgggctccgcaggccacgagaagctgccggtgcacgtagaagacgccctcacctatctggaccaggtgaagatccgctttggcagcgaccctgccacctacaacggcttcctggagatcatgaaggagttcaaaagccagagcatcgatactcctggagtcatcagacgtgtctcgcagctcttccacgagcaccctgacctcattgttggattcaacgcttttcttcccctcggatatagaatagacattcccaagaatggcaagttaaacatacagtcgcctctgacaagccaggagaattcgcacaaccacggggacggtgcagaggacttcaagcagcaggtgccgtataaagaggacaaaccccaggtgcccctggagtccgattccgtggaattcaacaacgccatcagctatgtgaataagattaaaacccgcttcctagaccacccagaaatctacaggtcattcctggagatcctgcacacgtaccagaaggagcagctgaacacgaggggccggccattccgaggcatgtctgaagaggaggtgttcaccgaggtggccnnnnnnnnnnnnnnnnnnnnnnnnnnnnnnnnnnnnnnnnnnnnnnngacagttcctgcccgaagccaagcggtctctgttcacaggaaacgggccgtgcgagatgcacagcgtgcagaagaacgagcacgacaagaccccggagcacagcaggaagcgctcccggccctcgctcctccgccccgtgtctgcacccgccaagaaaaaaatgaaacttcgtggtaccaaagacctgtccatcgctgcagtggggaagtacgggactctgcaggaattttctttctttgacaaggtccgccgggtgctgaagagccaggaggtgtatgaaaacttcctccgctgcatcgcactcttcaaccaggagctggtgtctggctctgagctcctgcagctcgtcagcccatttctggggaaatttccagaactctttgcacagttcaagtccttcctgggggtaaaagagctgtccttcgcgccacccatgagcgacagatccggggacgggataagccgggaaattgattatgcatcctgcaagcgcataggatccagctaccgggcactccccaaaacctaccagcagcccaagtgcagtgggaggacagccatctgcaaggaggtactgaacgacacctgggtctccttcccttcctggtctgaggactccacgttcgtcagctccaagaagacaccgtacgaggagcagcttcaccgctgtgaggacgagcgcttcgagttagacgttgtcctggagacgaacctggccacaatccgtgtgttggaaagtgtgcagaagaagctgtctcggatggcgccggaagaccaggagaagttccggctggacgactccctgggaggcacgtcggaggtgatccagcgccgtgccatttatcgcatctatggcgacaaggccccggagatcatcgagagcctcaagaagaaccctgtcaccgctgtccccgttgtcctgaaaagactgaaggccaaggaagaggagtggcgggaggcccagcagggcttcaacaagatctggcgggagcagtatgagaaggcgtacctcaagtcccttgaccaccaggctgtgaacttcaagcagaacgacaccaaggccctgcgctccaagagcttgctcaacgagatcgagagcgtctacgacgagcaccaggagcagcactcggagggccgcagtgccccctctagcgagccgcacctcatctttgtgtacgaggaccggcagatcctggaggacgcagcagcgctcatcagctactacgtgaagcggcagccggccatccagaaggaggaccagggcaccatccaccagctgctgcaccagttcgtgcccagcctctttttctctcagcagctggacctgggcgcctccgaggagtcagctgatgaggaccgggacagcccccaggggcagaccacagaccccagtgagcggaagaagccggcgccaggaccccacagtagccccccagaggagaagggggccttcggggatgccccggccactgagcagccacccctgccgcccccagccccgcacaagcccctggacgatgtctacagcctattttttgccaacaacaactggtacttcttcctgcgcctgcaccagaccctgtgctccaggctgctgaagatctaccgccaggcgcagaagcagcttctggagtatcggaccgagaaggagcgggagaagctgctgtgtgagggccgcagggagaagggcagcgaccccgccatggagctgcggctgaagcagcccagtgaagtggagctggaggagtactacccggccttcctggacatggtgcggagcctgctggagggcagcatcgaccccacgcagtacgaggacaccctacgcgagatgttcaccatccatgcctacgtgggcttcaccatggacaagctggtgcagaacattgcgcggcagctgcaccacctcgtgagcgatgacgtctgcctgaaggtggtggagctctacctgaacgagaagaagcggggtgccgctggtgggaacctgtcctcccgctgcgtccgcgctgctagggagaccagctaccagtggaaggctgagcgctgcatggccgacgagaactgcttcaaggtgatgttcctgcagcgcaaagggcaggtgatcatgaccatcgagctcctggacaccgaggaggcccagacggaggaccctgtggaggtccagcacctggctcggtacgtggagcagtatgtggggaccgagggcgcgtccagctcgcccactgagggcttcctcctgaaacctgtgttcctgcagaggaacctcaagaagttccgccgccggtggcagagcgagcaggcgcgggccctgcgcggtgaggccaggagctcctggaagcggctggtgggcgtggagagcgcctgcgacgtggactgccgcttcaagctcagcactcacaagatggtgttcatcgtgaactccgaggactacatgtaccgtcgcgggaccctctgccgggccaagcaggtgcagcccctggtcctgctccgccaccaccagcactttgaggagtggcacagccgctggctggaggacaatgtgacggtggaggcggctagcctggtgcaggactggctgatgggtgaggaggacgaggacatggtaccctgcaagacgctgtgtgagacagtgcacgtgcacggcctgcccgtgacccgctaccgcgtgcagtacagccgccgcccggcctcgccctgacccgccctcatgggcaccgggcaggcgcctcacagagcacagacgtgccctcggccttggtcgtgtcggggccgttttcttgaacgacgtgagaggcatctcccagcccctctgctgccggacagcgcactccagggcaggacgccgcccccgtggctcccggtctcctgtgggcctgctgtgtgccaaacctgagctacctgcacccgagccctggggctcagccccaccacaggggcgggtggacgtgctggccgaggaacaagcaatcatgtttgcgtccccgtccgtcacatgtgccaaatccctggcaggcagatggctcctgccccatattcttgccgtgtcttggaaaagtcacaggtgacagccctcctgaggcccacactttggagggggtccatgtccaagagaccctgacaaggaaggagttgagccctgggtaggcttgcttgaaaagtgagtccttccagaatattctcagagctgccagaaacatcatctgagggtttgggcatcagctctgcctggctggtgttcaggccctcagtcactttggaagtgagaagaacccttcagccaaacctttgggatcccattttgaagtccagagctggagcaggcgggcagtgccctgggagaccccgctctggataagacacccaaccccaactccagcagctggactctgggcccacaaggggagggaccccagccagtattccctcagagccggcacgaccctgctgtggggcggcgggcccagtcgtgttcctgcagtgggcaccctaggcgtatgtgtatacacgcacagatatttattcctttcgcttttagtggttgttatttctgtagcagccaagtcctgcggctccctggggctgagatctccctttgtggaactccgagagccgccctgacagtcccagccgccacccaaggagccccatccgcccacccaccctgggacccacgcggccactccagggatcattgttgtccttttgtgaggggctgaggcgactgtcccatggaggcatccaaggctttctgtgccaagaatcccaagtgactggggctggggaccacttctccaggcctctctccccgaccatgagagcccctggccctggcccctgcacaccagtgggcccagaataaccgccacccttgccatcctgcaacagctggactcaagtttccaggaagtggagatgtgtttctagaagtttcctgtggaacctggaggctcctgacgcctttgactccaggctgggcgattccgatgctgacccgtcctcctgggctccccacccccgctccccaagtgtcacacaggcactttgtacacatcctggttttctaagaagggaacttgccatcaagattcctgtaccaggcccacggccgtctcgggcagagccacctgggccccgggtgcagccggagaccccgccgagcccctcctcccagtattcccatccccgcatgcttctagggagcgcctcttttccgttcttgaggaatttctgttctggggcttgtccttcctttgcagctgttttgaatgtagttttccttttctatttatttgcacattaaagttaataattgaatattgaaaaaaaaaaaaaaaaaaaaaaaaaaaaaaaatcccccnnnnnnnnnnnnnnncagcaccccagagttacccggtgacctggccaggctctgggcgtgaggccttcaccaatccaagggctattagtacagacgtgtaaatccttccaccccgacccgcacacacacccacactgctgccctggcgggggccatgggggtgatgaatgaccctccaacagccccacatgggttgtttctgtttctttggcttttctcgctccgcagtggagggtttactaggatttaagcttttgagtgcattgagaaccaagacagggcctggctccaactctgtgggccagaggtgggggactgctaggtcgagtctgcagcttcgccagtttcttggttgggacactcctctggcagccccagcaccaccacaaccccttgcagtgtgccccagtcccctggattcgctggactgcaaaaaggagcaccagggaaagctcagcaaaggctcaggaggcctcccgggtcctcgggagatgaagcatccgtgcctaggaaaaggggacagagggcaaggagagaagtgagagctacaattccagcattggagaagcgaggggcggggcgtcaacggcactgcttcaggacgcgcttgctgaaacgactccaacagctagttcacagcccagctttgtacgttggttaccatagctactgctgtcactgtagctgctcccgtagggtcgttgattcctgaacgtatcacatctcacctgcccccttcctcgtgggacgtgtcaagttgactttaaagcctaaggtggcttgtggggactgcaccagaaagtgtctaaccttgtgttccccgaaatcctttctctgacttaggaaccagcgccccctgctggagaagttttttcattttgttagccgacttctggtagcttagcaaagagaccagctgactgtctctcggcccagcccaccacgccgagtagcttgtgtggatgcagtcctgtgagggtgtgcataaccgttcccaggtgtacgcacgcgcgcgcgcgcgcacagacacacacacacacacacacacacacacacacacagtaaccacgggtaggcaccaggggctttgtacattcaggagctgcagagaggaaaggtctcccatgtaccagagaaggaaaagtctgatcccgaaacagcttgaacgaaaggtggttaacacgtgaccaatccccatggcagacagcgggctggtgaacaggaagagcacagaatctctgtggggcgatgctgcagcggctgaaaccacgtcaagtcccccagagcccggcattctatgtaagcatccacctgtgacgccgtggagcaggatcttcattcatctcaccagagcaacagcccagtcctgaggatgggagggacgtgacttagccttgggattccacgctcgccgccctcccttggccgccctactccccagtttcctggcgatgagccatttattgtgtctcacaccagcctcatttccaactccgacttcctacttagaatgtggcagtggctttgtgagtgagaatcctgatgagttttccagtggcctctgcagaagctggcccccttctaagggcatagctaacccccttcccactcctgagtcactgaattcgaggagggtggggcagggaaagggctggcccccctgctgaaatcttgattctgcatttgaggaaggtcagggtgccgctgggggagcagggagcggggagggaggaagaggggaatgcacatctttttgcgccactattaaggcacctgtcaccttacatctcaatctggaatcaaagtgccctgggttgagaagcagacctgggctctggtcacactttggtcactcattagctctaggaccagtcactaatctctgagactccattttctccagggaaacgaggcttgcccagatagactaacaaccctttagtgctccaagaagtgagaatttccgaaaaagatctgccggcccagagcactccctcttgccctaatcctggcagggtctggatgtatttacccaactctgatcttgcgtgcagggatgcttgctgatggatgaaagaccacaataaaacaagattagcagcaaaacaattttaattgtcagtgaaaagcaaacatgtttgtcagactctcctgtggagtcatttcaaatggtaactcttctcttgtaccaggaagcagctgtaggtggggtaatgggatctgtctcctggtgcagaggggcagcttatggcggcagcagcttcaacaagcccgtcccacggccagccctaactgggccaagtgcaagctcctgatgagctgctgggcctggcagcgttccccacttcctagtgccttgctcccctggaattccacagccaatcaaccacagcagccgtgtcctccttgccagaaataacatcattcgtacgtcctgcctttgtaaaaatcaagacccagttaaccatcacccacttcttgcccctgattgatggggtccctgagtacaagcgtcctgtgcaatcccctccctcctaccgctttcctagctaagccctgctagccccacaaatcagaatctgggtttggggtgctggagagatggtgggccccagctcttccccacatagcccacgctgctcagggcacggtctccaaccaggctcgagattgcctgcctgcccgctgcagccgcagggccccaccctgtggaaaaggaagcttcccccactcaactgcactgtccttttctgctgtctagtctgtgctaagggacactacttgtacacttttcaaacggtgccctaaattggaagagaaggaggggccaggaacacagccctctccgccgtctttctccacctccacttcaccactcctgctctagacttcttgtcttgcatctttgataacttggagtcataaccgagtggatgtcggaataaatgagagatttgaagtagaaaaaaaaaaaaaaaaaaaaaaaaaaaaaaaaaaaaaaaaaa

SEQ ID NO: 7469 - DNA, 6197 bp, Homo sapiens
  misc_feature (1055)..(1078): n is a, c, g, or t
  misc_feature (1615)..(1690): n is a, c, g, or t
  misc_feature (2924)..(2939): n is a, c, g, or t
  misc_feature (3957)..(3957): n is a, c, g, or t
tttttttttttaataggaaaattttttaaactatccaaattagtctgttgaaagggtaccttttttgctgatctctgatgagttgtcttttcatccctatctgtagcttgagtgcagattgacaattcatttcagtgaattactaccgaataaaagtggttccggatccctcctagataaatgtgcacttacagcaactacctaggctctccaaatcactccacttggtatgaaaaccccatcaagatactaatcgtaagagttaatgtggctgcaaaaaataattatcctaagctttcagggataaaaagaaaattacccaggttctctgcactgtgaattttgctgacacagcggaggagcagatgactggttcctacaactgtacagccttccttgaagttctagatcgcgacggccgccttttttttttttttgcacatggcatttgcttttgaaatgcctttagtcaaatacaccagagcaactcccagctgagaccatttgagcacagttcctagtggggccacattcagagcaagcctctcgccggctcactcagttgagctgttgcttagacaccacaagtttctacaagggacttatggggaacggccctcaggggtcctggttcacatctcagctttattcatgtgctggaagcacaaacagcgagtccagggagggattctgctaatcagatgagtctgctcttgtgtctctttcttaggagacaaatacctgtatgtaattgcttcaagaactccatttggttctgatcattaccaatgaatataactgaaggagcaccaaagatcaggcataacctcgggccagttcattctgaaaatgatgtcgtaaaaagagtatgtgtgagagaaatctccttcccaagtttttaaccagatctcgtcacaatgaggagaatgctataatctatctcatggtacatttttggagcttaactctagcatactcctccaagtacactcacaattgtagctgagtcaagactgctaaatgaacagataggagaacttatattagactaatannnnnnnnnnnnnnnnnnnnnnnntgtaataaaaacggcaaacagataaatcttctaccaaaaccaaagatggaaagtcactgcaccagtctcctggaacttcataaaatcaatttcactggagcaaccagaagggtcatggagatgtataccactcgcttgggctcgtaggtttttgactggggatgcctctacactttgtaagtcatttctcccttcaaaaattgtattatatctttaatatatgtgtatttttcaatgcgagggaggaattactatgaaccaaagatatcttttggctccttctgaaagtgactcagtttgaattccattcagatttgtacagataaatagatggtcaccatttctgcatcaggttggaagagaccaatgataaaggaacccaacgtaaggaatagcagttctgaaaatagacaaagcctagaggaggtatctatttcactgagagattacacgaggggacttattttttatgttcccaattttttcttctgataatattaatcaatgtacacatgattgatgcatgatattacactnnnnnnnnnnnnnnnnnnnnnnnnnnnnnnnnnnnnnnnnnnnnnnnnnnnnnnnnnnnnnnnnnnnnnnnnnnnnaaaacacatctttcacttacttattgaacaaacaataagcactcagaactaatttatttatgcaggttgcaaatatgtatgaagcaataggttctggccactgccacaatttgaaatcaataaaataagaaatatatatttatatatgagggaagatgctgtttgatagagcatgtgaaatcaatggaaacatatttattaaaagtaaacctcacctttttcaccaaatagtaactagagaactagtcctagtatcttgcgtaattcttctctgtcttcattgggaaattatgtttgaaaatctttcatcacctataaaatggtgagcctcttgtactttctattcagtgtagaaagagtggactgataaataactttacattgttggtagtagtttctacagatccagtttattgcatgtcgtatctttattgtagatattaaaaacacatgataaaaattgatgtgtgcccctccttgtttggccagtatcacagaaaactttgtaaaaaagcatggggaccctactccctagattatttgagccatttactaaaattggccattagtgatacagtgaaaacaagctaaggaaatgatattctcctaaaaagttatattccagttttgattattataacacagcacaataaatgggcagtatacgtctaatggaactgagatttaaggctttaacaattcgtgttttaaaatattatattgaagactgcacaaagagaaaattatacgtttctccaatcctgtgatcatgtctgtaaataccttgcaatttcaaattacttcatccgtcattaactatatgatctcccaaacacagccttctcaaaatcgataaaaatttgccactgaatatgcattaatagctataacaatgggtgacatgccacacaaatttagcttatgcaatttatggggtgtgtgtttgcagactatgaaatgtatgaagtgcagtctcccatggagagaatagagaggcaggatggcaactagtcatgaacgcaacaatttaggttaaatgataaagaatacaatgaaatgtccagagtaacacttggtctctacctttctaacattctaacccaaggccagtgtcatgggcttggctttcttccctgtcgcctcatactgagtatgcaatttacagaggacatctgttgctttatgtcttaaggccactagaggaagtcactacattcccaacaaagatgtgtcnnnnnnnnnnnnnnnnaacatttaacaagaaacaatgtgtaaccaagtccccacagtaaaatgtgtcttcagaaacatgagaatcacttttatatagccaacctcatttgaattttatcatgaacataaattatcggtgagactggtgtgcggggctggatctgtgagacaagctcacactctcatgtgtgcattctctattaacatatttggaagattgcccacattttctctgcagacctgccacaaatccttaccttcttactgaagaatgtgactattgtagcattcgtgcaattatgccagcagaggaggcactagacagtttatagactcttatggaagttgggcacatttcccaggcaggtggaatgctagctagatctagaagcacccttaaaggtcatgtagaatcaaggtcccactttatgtttcccttgggagaaaactgaaacccatggatgctgtaatttgtttaacggcaaagaaagagccaagaattgtttctcgtagttccaggctcctgatctaggaatgtttccttggctccatggcatctcccagtttgacatagtgggagctgagaaatgccatatggcctcaaaataaataaacccttgtacatttaagtgttttcccagattttcagatgcctctactcttgctgaactcatcaccagctgtatcagtagagaggtgttatggggcaattcattagatttctggtaggtcatgaatggttggtataagctttatttactcatatattgtcatccagttctttgaaattcaatcttatcctaaagtggtagtcaaagtaaaacacattaagtaggtgtttgtgtttagcagtcctactaattcatcacaatcacatagtaattgtgattataatttttggaatctttatcactttctagcactttacggtgtcattatttatggcatttttaacaactttgttgcataattgataacatcagggctacatttttttcatgtgagcctcaagaagcttccattatcaacaaganttggggaaatgacttttttacattataataccttatatattaggtttttcctgataatcttcagtagacaatgatttaaattaactgaagtttaaataagaaatatgttaaaattactaaataatatgaaaaccacattatacttgtaattttcagacacttttctcctaccttaagattttaacatcttgtaaatattaatatttgaaggggagaggaaaaatacatttgtagtagaaatattccctctaacaattctgtttaactagtaagttttttttaagttatcttccatgcctgcttccctagtctgaactccacattccagttgtcagaagaatgaatggatttaaattttctaatcattattttgggcccatgttagcagttgaaacaattaagttcctcactctttcctgcttttaggatgattttagactgtgagcataaaatcaaccctttctgtcagcacagaattgaacatcgaatggagcaaggtctacactctcagcctgtagctgtgctaatgttaggattgaattgttctattaattccctcaagagacccacagcctcaaaagagttgcttattatcagatgtccgaaattcagaaacccaaagtcaggcaaagaaggaaactgagataatgatttaatttttttaagtcactgcaggatttctctcaaagaaaacatctgaaaatggttgagaaagtagttccagatcattaactattttacagagggactgaaagccagggaaaataaagaacagaatgatagtagtatcttgatattaaatttgcatcagaaatgagcaaaatatgtcaatatgaaataatttgaaatcaaattcagattcacatgtatagtgcatagttcaagaaataatgcttactcttgtaaaaaaaaaatatatatatatatatatgtatcagcaggtagagtgtgggagctccaactttgttgtgaaagctgataacagagtatgattctttccagttacaaaatactgtattactttagttatagcaagcagtacataaatgacatcaacaactcaggctgctccctgacataaaagccagttccatctttactgcagatgacaggagactttccaagacctgcagaggccccctccaccccaaccttagtgcatgctcacacacacacacacacacacacacacacacacacatttttggcttttgacccactctgtgtgttccactgaagttatcttttccttaatagattcacacagaattaccccatcctgcaaaatccttatccctatgaatctctaaaatatattaaataatgtgttatatatttgctttttgtaaatctttatttaattaatttatatatactttgtgaagtcttatactgtacatcataaagcgatgtcatctgtagttggttcaatataatgtttatgatcattttgataagaaataactttggacattaggcccttgttaagaaataaaacacccattataaatttgcttctgttggaaaatacatgatttggcatacttcatttttagtaacaatctattctagataaatgataatttggggacatctgtacttaaaaactagctgaactacgttttgggatgagatgcaaagcaacagctgtccctggaactgaaatgtgaatttctagcagaacagaaaatattataataatgaggcaataataaaattaggaaattaaattataagaaaaaaaaaaaaaaaaatttttccccttggtaaaaatacatgaaatacataattgaaaaattaccttcttctgaagtcgtagtttttaatcttaaccatcaataaataaacctattgttaacaatgtcttattcataattctaaaaaatttacaaatgatattgctatgaggttgtgcactattaaagtttgctccatcacttaaaggtaaagcagttcaaaaatactactttacatcacaactttgcatggctgagattttgaacaactaaattgatggttttacccacaagttatttcataaagctaacactgtaatattacttggttttcttatacttttgttatcatgtgatgaaatgtaactatgtaattaaacaaaattctgacaatcatattctgctaatgtttaaaatgttacttattccttcacttattagcttgctattttgaaaataaagtgaaagaaggccctttattaaatgaaaaaaaaaaaaaaaaaa

SEQ ID NO: 7470 - DNA, 2334 bp, Homo sapiens
  misc_feature (1530)..(1547): n is a, c, g, or t
agcggggggtttgccctgggccgctgccggtcaggtcggccgcccctgacagctccgggagcatcaagcgcgacagcggcgccctcacctcgggacatccacacaccgaccgctcctgctccagaggcaacaacccagcgcgcctagcctggcgccgtgcagcgaagcccaagagctggcctcgccacgaaggttgaaccagccaaattttcgagacagctcacggcttagaggaaggttcatctaaataaaggccggctaaagtgacattgcagggattaaatccttctttggctgcctgtgtgaccagaaggcttatttgcaagtttcttctttcctggggtccagattattaggtctccagcgccctgcagcttgacagaaagagaagcatgaaatgaaggtcagagatgagatcccgcagcagggacgtgggggcctcccaggggcatttacgcaccagagtgcaagattctctggccatcaagggaaatagcaaacagaagcctttgtcctggggcacagccacctaccacaaagcatcagactccacgtctggccagaaagttcctggagtcccatcaggccagtgggtatgtaacatgtgcctaattgtacagctagagcctgcaagttcaacgtgagggaaggtgggaaatgtcttgagtgaggcgagcagctcctggctgggctgggcagactcagctaccacgttcactgccttcctctcactaaagccgagagggaggctgctcagctctcaggaaaactcttttgaaccctgggcacctgctgtcctcagttggcatctcccaccctctgagcctcttctgctcctgcacaacctgcctcttcgctgagatggagacgtgggcccccgtggacgatgactgcagtgtatatgaatggaggtggcctggtgaacccccattatgcccggtgggatcggcgcgacagtgtagaaagtggctgtcagaccgagagtagcaaggagggtgaggagggacagccccgccagctgacgcccttcgagaaactgacacaggacatgtcccaggatgagaaggtggtgagggagatcacgctggggaaacggataggcttctaccgaattcgaggggaaatcggaagtggaaacttctcccaagtgaagcttgggattcactccctaaccaaagaaaaggtggccattaagatcctggacaagaccaagttagaccagaaaacccagaggctactatcccgagaaatctccagcatggaaaagctgcaccatcccaacatcatccgcctttacgaagtggtggagaccctatccaagctgcacttggtgatggagtatgcagggggtggggagctcttcggaaaaattagcactgaggggaagctctctgaaccagaaagcaagctcatcttctcccagattgtgtctgccgtgaagcacatgcatgaaaaccaaattattcatagagatctgaaagcagaaaatgtattctataccagtaatacttgtgtgaaggtgggcgattnnnnnnnnnnnnnnnnnngcaaaaaaggtgaaatgctgaacactttctgtgggtctcctccctacgctgcgcctgaactcttccgggacgagcactacatcggcatttacgtggatatctgggccttgggggtgcttttgtacttcatggtgactggcaccatgccatttcgggcagaaaccgtggccaaactaaaaaagagcatcctcgagggcacatacagtgtaccgccgcacgtgtcagagccctgccaccgactcatccgaggagtccttcagcagatccccacggagaggtacggaatcgactgcatcatgaatgatgaatggatgcaaggggtgccataccctacacctttggaacctttccaactggatcccaaacatttgtcggaaaccagcactctcaaggaagaagaaaatgaggtcaaaagcactttagaacatttgggcattacagaagagcatattcgaaataaccaagggagagatgctcgcagctcaatcacaggggtctatagaattattttacatagagtccaaaggaagaaggctttggaaagtgtcccagtcatgatgctaccagaccctaaagaaagagacctcaaaaaagggtcccgtgtctacagagggataagacacacatccaaattttgctcgattttataaattgcactagactgcttgtaactaaccaagatgattgttgctgcttctaaatttttttcaaggacaacttgagtggagacatttttgtaatttttaaataaacttaaatttgagatatgcaaaaaaaaaaaaaaaaa

SEQ ID NO: 7471 - DNA, 1158 bp, Homo sapiens
gggacaactaggcaggtcgggcgggtgtgagtcgggcgggcgcgttccgttggcggcggattcgaacgttcggactgaggtttttctgcctgaagaagcgatatacggaccggattgttttcgctggcccagtgtccccggagcttgtgtgcgatacagagagcacctcggaagctgaggcagctggtacttgacagagaggatggcgctgtcgaccatagtctcccagaggaagcagataaagcggaaggctccccgtggctttctaaagcgagtcttcaagcgaaagaagcctcaacttcgtctggagaaaagtggtgacttattggtccatctgaactgtttactgtttgttcatcgattagcagaagagtccaggacaaacgcttgtgcgagtaaatgtagagtcattaacaaggagcatgtactggccgcagcaaaggtaattctaaagaagagcagaggttagaagtcaaagaacatattcttgaaagttatgatgcattcttttgggtggtaacagatcataaagacattttttacacatcagttaatatgggattattaaatattggctatatcaaaaaaaaaaaaaaaaaaaaaaaaaaaaaactcttttttcggggtggggaaaaaggagggtaatgtgaatggggccttgggcatatagtttgtttcttggggccaagttttttttgtacaagtggggtaaatctggcgggtccccattatagagaggcgaataatccagataaggcagggttttaacccggggtttagttgaacgtcgggggaaaaaacggggagtcacagagcaaggagagcgaggagagtagctagcgccgaccgacgcgcggggggaccgtgaccagaatgtgtgtaaacgaacaaagaggcagcatcgaagaaacagaacagaagaaagcaaggatagacgaagcaacaaagagagagaagacagagggcgagcagacgaggggacgatcggagaagagagcgggacgagagcgaagaaagaaggagaggagagaagaggcaagaaggagaggaaggcaggggagagggaaggagagcagaagagaaaaaggggggacgggagaaagaagagagaggaaggggaaggcgaaagggggagagggtggggggaaaggagcgagc

SEQ ID NO: 7472 - DNA, 584 bp, Homo sapiens
  misc_feature (520)..(520): n is a, c, g, or t
tttaaaactacagttcttttattcatcctaacacctagcagacagccctccacatagtaagcacttaagtatttggtgactggagatatgaaaaggcctacagtaaaagagaaaaatcatgcaatcactagataaaaaactacctagatttgtgtatctgactccaaaattgggctggaattgttagtagacaaattttcttctggcaaacaaacaaaaatgcaacaaaacttcaagataaacaatctatgtagtaaggcagtgtcaaacacatccgttttacccaaacgacagaacaaataccaataagatgacagacatcaaaatcaaactttgcagcaataaacaaattttcatatctgactgtaaattaaaatcttgtgtgcttagaaacatgttcatttagacagtattaaaaagtaggatgttagtctcaaaatccaagagttaaattattaattcaatttcaatacttataatttagtatcttactgatagatagaggaccaggcacagtcanagacgtaagtgcatgcttacgtgatccagaagtggcagaaaggtgcataaggcctcggcgatct

SEQ ID NO: 7473 - DNA, 1795 bp, Homo sapiens
  misc_feature (6)..(6): n is a, c, g, or t
  misc_feature (133)..(135): n is a, c, g, or t
  misc_feature (170)..(172): n is a, c, g, or t
  misc_feature (187)..(187): n is a, c, g, or t
  misc_feature (287)..(287): n is a, c, g, or t
  misc_feature (323)..(323): n is a, c, g, or t
  misc_feature (328)..(328): n is a, c, g, or t
ccgcanagtgcagcccctccacagctgtggctcctctcggggcggaggggtgcctgtggctctcagccacttccctccccaccctggtggctccaagttggttgcggggagagggagaatggagtagagtcannnttggacaagctcctctcccccctcttttcccaccnnnactcctatttccctnccaaccaaggagcctccagaaggaaaggaggaagaaatgttttcttaggggaattcgctaggttttaacgatttgtttctcctgctcctcttctttcagncctgcccccacacaaacctgtcccctcggttgtgtngaagncccctgaacagtggcaggggtggcagaggacacgggcagccactgcccgtacccccttttctcttctgtaagcccatgccctgtcttcccagggacttgtgagcctcttccctcgacggtcctcttctctccttccagtcctctccccctgctgtctgcagcccctccccggggagttggtgctttcttttcctttttttttttttccagggggagggaggagaggaaggagggggatcagagctgtcccaaagagggaaagcggtgaggtttgaggaggggcagaagcagggccggcaaaggttgtaccttcataaggtggtatggggggttggggtcaggccctgaacatcgtcctacttgagaatctgtcaggggaaaaagtcaaggggagcaggaggaagagccaggagggccagaggcagagaagagatggagtcttaggggccagggtgagcgaggggtccagggcctagaggtgcttcctgggggcgggggaatgcagccagtgtccccctcccctcttccaccccagctccagccctggtcttgtcttttcatccctcttccccacgacagaagaagttgtggccctggccatgtcatcgtgttcctgtgtcccctgcatgtaccccaccctccaccccttccttttgcgcggaccccattacaataaattttaaataaaatcctgaaaaaaaaaaaaaaaaaaaaaaaaaaaacgtatcggccgcccccacagtatccctcgacgcgcccacgcttactcccacccgcctccctcgtaccccctggtcctctacagggcgtccctctcatcggccacgcccctggtccgccggttctcctggtccgcgctcgggttacacccggttgccccgggtacgtttcccccgaggaaaccttcctcccccgtggtcgcggcccctatcttttacgttagcccctcttcccgccgatttttccgccgcttccgggtagcccctccccatctttcctccccgcgtacgccccgctccccacccagtctcgactcccgccttgccctcttccctgcattccccccccttatcctgtccccccccgtctcccgttcccccgcccgctcgccctcccccgcttttcttccccgccccccctcctgtttgccccggtgcgtatttccccgtaccgcgcgcctatttacctctcgtgacttcgtcgcccgcatgccgccgatcgcgcctgcgcctgaaccccccgcgtccagtgtgtccttcgccccgcgcgttattgcgcgtttccgccctttcgcccccctctctcctctttctccccccactccctacctcccccctttttgctcccccctgtgtccgttgcccccccgcgctagccgcggtcttccctcgtgcggcccgtgcctccttttctcgtgttcccgccgtcccgctccctattcttcccctctagtccccgcccctccgc

SEQ ID NO: 7474 - DNA, 621 bp, Homo sapiens
tttgtttttttttttttttttttttttttttttcaacacatcttttttatgtataaatgggtcagtggtacagagggagttactttttataaatatctgcagcaaatcccctaaaaaagatgtgaataaaaactctctctcagcacaaagggcctattccttccccaaaagtgttaaattcccgagagcctgtgcttagccaaacacttgtggggcctcctgggaagaacaggaggactttgggaccgagaggagagccttcccatctccccggagagcggaggtgacttgaaggtcatctgttgcccaggacttgggagtgattaaactgtttcttcccaagacttgaggtcttctttgtcaagctgctgattaagcggtctctctgtttcctggcagtggcccagagggagggaggagaggaacctacaatcgcgtgaggaagtaaaaaactctgggtattttgataaaaaaaaacacttggtaatcactgtaaccctgtaaagccgatgtatcgaattcaccagagggaaaattgtagattagcattctggaagctataaacacaagcatttctttaggaagatcattacttagcaccaatgtccctcgtgccgaatt

SEQ ID NO: 7475 - DNA, 804 bp, Homo sapiens
  misc_feature (790)..(790): n is a, c, g, or t
agcgagtctgcccttgcgagctcagagtgtgcccgtgcgccgccgccgtcgtacctgccgccgccgccaccgccaccatgcccaacttcgccggcacctggaagatgcgcagcagcgagaatttcgacgagctgctgaaggcactgggtgtgaacgccatgctgaggaaagtggccgtagcggctgcgtccaagccgcacgtggagatccgccaggacggggatcagttctacatcaagacatccaccacggtgcgcaccactgagatcaacttcaaggtcggagaaggctttgaggaggagaccgtggacggacgcaagtgcaggagtttagccacttgggagaatgagaacaagatccactgcacgcaaactcttcttgaaggggacggccccaaaacctactggacccgtgagctggccaacgatgaacttatcctgacgtttggcgccgatgacgtggtctgcaccagaatttatgtccgagagtgaaggcagctggcttgctcctactttcaggaagggatgcaggctcccctgaggaatatgtcatagttctgagctgccagtggaccgcccttttcccctaccaatattaggtgatcccgttttccccatgacaatgttgtagtgtcccccacccccaccccccaggccttggtgcctcttgtatccctagtgctccatagtttggcatttgcacggtttcgaagtcattaaactggttagacgtgtctcaaaaaaaaaaaaaaaaaacgcggaaaaagggcggccgctcgcgatctagatcnttttctagatcgcg

SEQ ID NO: 7476 - DNA, 4487 bp, Homo sapiens; identical to SEQ ID NO: 6716

SEQ ID NO: 7477 - DNA, 5470 bp, Homo sapiens
  misc_feature (4931)..(4931): n is a, c, g, or t
  misc_feature (4937)..(4937): n is a, c, g, or t
  misc_feature (4945)..(4945): n is a, c, g, or t
  misc_feature (5053)..(5053): n is a, c, g, or t
  misc_feature (5068)..(5068): n is a, c, g, or t
  misc_feature (5071)..(5071): n is a, c, g, or t
  misc_feature (5087)..(5087): n is a, c, g, or t
  misc_feature (5108)..(5108): n is a, c, g, or t
  misc_feature (5116)..(5116): n is a, c, g, or t
  misc_feature (5124)..(5124): n is a, c, g, or t
  misc_feature (5152)..(5152): n is a, c, g, or t
  misc_feature (5160)..(5160): n is a, c, g, or t
  misc_feature (5188)..(5188): n is a, c, g, or t
  misc_feature (5207)..(5207): n is a, c, g, or t
  misc_feature (5216)..(5216): n is a, c, g, or t
  misc_feature (5224)..(5224): n is a, c, g, or t
  misc_feature (5242)..(5243): n is a, c, g, or t
  misc_feature (5247)..(5247): n is a, c, g, or t
  misc_feature (5254)..(5254): n is a, c, g, or t
  misc_feature (5256)..(5256): n is a, c, g, or t
  misc_feature (5259)..(5260): n is a, c, g, or t
  misc_feature (5266)..(5266): n is a, c, g, or t
  misc_feature (5280)..(5280): n is a, c, g, or t
  misc_feature (5284)..(5284): n is a, c, g, or t
  misc_feature (5286)..(5286): n is a, c, g, or t
  misc_feature (5288)..(5288): n is a, c, g, or t
  misc_feature (5290)..(5291): n is a, c, g, or t
  misc_feature (5308)..(5310): n is a, c, g, or t
  misc_feature (5313)..(5313): n is a, c, g, or t
  misc_feature (5321)..(5321): n is a, c, g, or t
  misc_feature (5324)..(5324): n is a, c, g, or t
  misc_feature (5326)..(5326): n is a, c, g, or t
  misc_feature (5328)..(5329): n is a, c, g, or t
  misc_feature (5337)..(5337): n is a, c, g, or t
  misc_feature (5339)..(5339): n is a, c, g, or t
  misc_feature (5348)..(5350): n is a, c, g, or t
  misc_feature (5362)..(5362): n is a, c, g, or t
  misc_feature (5377)..(5378): n is a, c, g, or t
  misc_feature (5385)..(5385): n is a, c, g, or t
  misc_feature (5401)..(5401): n is a, c, g, or t
  misc_feature (5408)..(5408): n is a, c, g, or t
  misc_feature (5412)..(5412): n is a, c, g, or t
  misc_feature (5416)..(5417): n is a, c, g, or t
  misc_feature (5420)..(5420): n is a, c, g, or t
  misc_feature (5429)..(5429): n is a, c, g, or t
  misc_feature (5431)..(5431): n is a, c, g, or t
  misc_feature (5457)..(5457): n is a, c, g, or t
  misc_feature (5464)..(5464): n is a, c, g, or t
tcatctgcatcatctgcatcctcctgctgcccgagagcagggaccagaacctgccttagaacatttctaacgggagccataacacgcgccagccgctgctgccgcacaagaagggggagcagccactgctgctcaccaacgccgagctcaaggactactcgggcctccacgatgccgcagccgcgggtgacacactgcccgagggtgccacggccaacggcatgaaggccatgtagcccggcctgcggaacccggggctccagggtctggggcagcttgggcacaggtttacagaccagggaccgaacacgcagccaggggtgggaaagctgcctcagccaagctgagcctctcaactggtgtggggaaatcctgtctttccaaaagtccaaggagcgcgggtcggaggagacaaactctttggaaataaccctttcaagactttcttttctgccgttaaatgtgtgtatttattttggtcatttttacgagaagcactttattccctctccctctcactgatcacaaatggaatcacctccctgggcagcgagacgcagttgctctgggaagatgccacagtgaccagggccatggccggtccctctggggagatgggacacggctcctggcagcacccaggagccccccaggctgcctgcctgcgtgcagaggcaggagaggaccgtggagcgtttccgggactgcattttagacggagtgaaatgtacatgaatttggcttttgctagagtctgtgtatggttttttaaggtcctttttccctttctgtttgtaaggtaagagcttctgttcgtgtgcagggaaagcagctcacagacgccgttaaaaccagcttcatctttccttcaggatcatccttttgtacttgatgctggaagctcttggagaaaaagcttaaacatttcaccagaaatcttaattgagcagcagtcatatcgccacagctttgtgagtacacagctaacagatgcgtcgagacctgagatgtgctcgtttttattcctcctctcccagattggctccagcagaaaagtccctcgtgcacaggcagctcttgtgccggcactacttgaaaacatggctactttctaagctacaaaccattagaaaataactcaaaaagatggcagaggcaaatccacagaaggggggctgccctccacacacacacgcccgtcacccacaccttgagcacacaccatgaagatcaccagcttggatggccgtcacctcagacatcactccagggagcacccgcaggagctgggccccctcacgcctgccttcctgggccagcttcctgcttgcagtcactcgcatagcacagaggtggggcttcgggcagggagcggagattcctcataggtgagtccaaatgacctccagcctctcgaaggcatcaagacaaattgaaagaaagcaataactcaccaaagctcaacgctgcccctgcctcgacctccatgggtctcttcgtgttcctcgtttcaccccagaaagtggaggtttcctcttggcattttcggaggaaacttgtaggacacccaaggcgactaagagacagcctccttggcaagggcaggcaccactttgtagcaacttgggcaccagcttttctggacagcctggcttcttactggcattgtccaactcatcccttctcgaagcatgtctttgccatgggctgtgtccttccagggaaattgtggtctccggcctgggtgagacaatgaagtgacttccaaccgacagttgctagaattcacagggcagaaaaggggttgaccttctccccttctggctttccacccggcctgctgcttgctgtcgccactcatgtctcctccacatgcggtccacacatcagtaagggcctggagatgtgtaaagacacagcaaggggcaagcagactcttggccacgtgtttccagtggctggaccacgccgacacctgggatcttgagatacccaggaagggaggctgtctggccagcctctccctgcctccacttgctccacgtccagctcatcctcaccttccctcttttttaaagtcacatttccatgtttcaacattagtttgcattcacctttacaaaggcctttctttagatctgtgcagcctttgcgtgccaaacttgtgaaattccttttaccttttttggagtacttgctataaagccacctgtcaacaaacccccattatgtacagaataggacctatccagtagccaggccagtaggcagttggggaaggtgggaaggatccagcgaggcccctgagcctgcacctggacaggtgtacgtctgcacccatcaccctcagcaccaggccaccctgcagtccacttactgtactgtgttgtggaaggatatgctaagtgatgaaagttgcgagcagtctcactggtcgtgtaaacttttttttttttttggaaattgaagctgtagagtgctgcccgaaatctctaggaagttggtggcaagggacagcactcacactcttctggtcatgatctctgatctccacctcaaatgacaataaaaaactggtccaacgaagacactgctcagcacttcagccatcaggactaatccatcgatgactggaaaagaggctagctttgaggaaaacagcctgggctcttgggagcagagtccagtgggtgtgaggctgacttgccgacggtcggcaggtaatggctctcagccggcgaggcggtcccacagctctcctcccagggcagcctgaggaggaggaggccgggtgcctgtttggtggcagcttcagcctagggatacctgaagctgttgagcaacacctttatgaaatgttgccagagcagcaacacttccctgtgggcacagccccgggaaatccggtaccaagtgagcaaggtggcaggacccacccaagcctgatacgcatctgggcccgccgggctcagcaggggaggctgctacggctgcccacttcccagcaccgtctgtcaggcttgaacccctctgtgctgtcccttcctggctaatagggagaccctttcgcagggcacccactgtttcaacttgaccctcccaccccctgctactctcctccacacacccctccgttccgctagcctaccctgtcagcctttcaataaaagttatgcacaaatgtgaacacctgagatggagctgaacatttcttcactttgttctttttctgaagtcaaactcttatcaaatgccctaaaattattaccacccaagagaaacaggaaaaaggttacatgtttttgtttactgagagtaagatcacctgcatctggaagacgggctggtaaattggtttggctacagaacagaaagaaaacaaaaacaaacctcgtaagggaagtatcgcactcagacaccaccacttcctagagccaaatgagcaatcccaaactgcaagtgccgtaagtgggcctgtgacgtcacaccgcccggcccgaggtatcgcatgtgcgggggaggcccacactacagctgtcctctcgtctagaaggcaccacctcgctttcatgtcccgtgtgttttggaaaagcagtatggtgtgtcatgtctagcggcgaacacttccctccctctgtccttgaggttgtaatataaaaactgtgtttctgtacgtgtgggtgggaattctctgacggtgctcgttcatagcacaagcttacgctgagttctgaactgtcgttcacagctgcgtgtctgcatggtgtcgcatctgttgtacctttggggaaaatttgtatgtaaatgtacagaaataaaaacgttgccccattaacagatttcctctggaatgtcttccctacctcacctgatggtatccaccgaagggcatttcactaccattaatggtgagtaataaaatcctccgtgttcattcagacctcactgcgtcactactttgaacgcctctgtaagctgtgtcttcactcgccccgaggtgggtggagggaggcctctcactctgcttcgagtcctggtcttaaaggtagtcagaggcagaggctggattaaacacacactgtttaccaagtgccactctcagaccacctgagagacggggggccatcagtaaaattaagaggaatttttttcccttgttcgtgtatgttctgctgatccgtggcctgaaggttcctagagacgtcaagaaatgaatatcttacactgtgattctgtgaggaaagactggtaacccaaaactctcttctctaatgtattttttaacgaaaatgacaatatttctttaataaagtatttataccaaaaaaaaaaaaaaaaaaaaataattttgtgtaactcgctattatatttctagagaggtgtctactcagctttgcaagctgcgacgaggctggccggggcctcgaggttagcacgggaagtctgcaaaggagggaagcacccggaactacagactcactcctccgacgtgcctttccatcctggccagggtcactaccttcacttgcctgctgctggctcagtgcaagacttttgcctctggatgaacaaaaagggttcagacggaccccaaagattagaaagttctttgccagtggtcctcaaccttgcctgcacggaggcaccaggggagctttcaatcctgccaaagcctgggccccagaccatctgaacctctggagaaggcccaagactggaacccactccaagtggtaggattaaagattaaaccctaaagagtacaaatgaccaaagcaggtacctgaggtactctggatttgggatagaagacaggggagaagggaagacgatgaaataacaggaagagaaagaaggacctgaagcctctgaatccataaaaaggaaggagatcaaactataattgacatctaagtgccacggcacttatngtttgnaaagcatntctacctacctgcttaatcctaaaaagaacccaccaaggtggggattactccaactttatagatgaggagacaaagcctagagaagtcagacttcacaaagaccacanatgcagtaatggggnagngtcgagaggtgctcanattgtagggcccaagagagancacagcancccccggngtgcccagaggaggggttttagggagancacagcangaagagacggtcccctgggggtttcacntgcaaatgagggggatttntgcatcaantcacaaanggaggatttcaagttggnntacngtgactntnaanncccccnccccctcccccccncctncntncnnatccctctcccccctcnnnctntctccacnctncntnncttccccncncttcctccnnnccctctttcccnccacctttctccccnnccccctntctcttcctcttttcnccccctncccncccnnccnccccctctncncccccccttccccccccccctccccnccccccncccccc

SEQ ID NO: 7478 - DNA, 946 bp, Homo sapiens
agcgctgactgcagctctctctgatgctcacattctttcatgcttagttcctcaggttagaagggagagaaatgcacacacatgatccaccagcccatgtgggattctctctgcccttctggcatctgaaggctgtgattcaaagatgccccctgcaaccttcccataaatgaaccaactgattctcacaaccgaagggagaatggacacctcccattgagggagaaaaaaaaaaaatcagactcgggccggctggcaggtcacctgtcatttcgcagctcatcttgcatagttccatagttagtcctattcttaagtaaatataaggactattaaaagcttctacgaggtgcacctatgtgtgtctctggggtcagtcttgtgcttgacacagtgaaagtccatttaagtccggggtgaaaaaccagacctcaacaactcacacaactttccaaattaaaatcagaaataattttcctctcacacttactatgatactaaggaagttcagctacacttgttaggtaggtaacccaaacctcacagtagtggcaataaaatcttcctcattttttctgttaacatttagactttaacactgataaagcgatatccgttcatgggagagaggcacacctactaccattaaggggactaagacgaaaattatcaatgcatttgtgatccaaaaggagaagtatttggctaagaagaaaatgagtattttatatagactttccagagtagctacctgcaactggagtcgggcaaaaaaactaagagtgcggcaaaaaatttatcttcttaaatattacaggtatggtatgaggtcttttgaggtacaaattgctgatagaaaaaaaaaatagccaaaaccttctaatacagacaaaatgtagtagagctctggcctgttgttatgggttctgactttggaaagtcactt

SEQ ID NO: 7479 - DNA, 1756 bp, Homo sapiens
  misc_feature (137)..(137): n is a, c, g, or t
  misc_feature (213)..(243): n is a, c, g, or t
ttcccaaccatttttcattagggtaggtaggggggcccacaataattcacatttcccagttggctaataaggtccaagcaaaacggagacccttggcatttttctgtgggccaagggaaaagaatcccttttgcttntaaggaaaagcttggcccccaaaattagattttttttttttttccccccgtttagggactgactggtggctaaatnnnnnnnnnnnnnnnnnnnnnnnnnnnnnnnaagagttaagggcccagtgttcttgaaaaatcaaatcaaggtagttgaatgtgatctttttgccagaagctatagatagaaacagcctggaaaaactaaagggaaaaaatacaagtgttttcggggcatacattttttttctgggtgtgcatctgttgaaatgctcaagacttaattatttgccttttgaaatcactgtaaatgcccccatccggttcctcttcttcccaggtgtgccaaggaattaatcttggtttcactacaattaaaattcactcctttccaatcatgtcattgaaagtgcctttaacgaaagaaatggtcactgaatgggaattctcttaagaaaccctgagattaaaaaaagactatttggataacttataggaaagcctagaacctcccagtagagtggggatttttttcttcttccctttctcttttggacaatagttaaattagcagtattagttatgagtttggttgcagtgttcttatcttgtgggctgatttccaaaaaccacatgctgctgaatttaccagggatcctcatacctcacaatgcaaaccacttactaccaggcctttttctgtgtccactggagagcttgagctcacactcaaagatcagaggacctacagagagggctctttggtttgaggaccatggcttacctttcctgcctttgacccatcacaccccatttcctcctctttccctctccccgctgccaaaaaaaaaaaaaaaaaaaaggttaatcaggaattcaaaggggtttcagtctttatcaaaagaagcagcatgtggaaaagagctaaagaaaccacccttggtcccaaacgtccatttaacccgatattgttatgccaacacaaaaccagggacctttggggatccctttctcaacagcagggaccctcttggagaaagacatcaatcggaattacccacggttatataagcgaccctcagggttaccaaaggataacatattattggtaatattaatagccgttaagtaaataggaaaatatcataggggcgactacgtccattcacagggtgcatgatgggagaggaatcgaaatacaatacattcggggaacccatagggcaatatcatcactaggcatcattacacaaagacattggtagacggatgagacacacggagaacgggaacaaaggccaggatatacggtaacatacacccagcctaggcacacagcttcgagagggcggaaaacgcataaaagattaacgccaaaatatggggctacgggaacatatacgggcactctgggttccacaattagaaacataagaaagacaggggaaagcgaaggatggccaaaacgagggaaaaaaggagaaatgtgcagggtgggcagaagaccacaacacagagtgacaaacgcgcccatgatacaaccgacatggaggaacagtaatggcacagaaactgagggaaaagcacgaaaaacgggcgcacacacgcggacaaccaggctg

SEQ ID NO: 7480 - DNA, 3100 bp, Homo sapiens
  misc_feature (3086)..(3086): n is a, c, g, or t
gagcgggcggcgaggctcccgcgcgcggctgagtgcggactggagtgggaacccgggtccccgcgcttagagaacacgcgatgaccacgtggagcctccggcggaggccggcccgcacgctgggactcctgctgctggtcgtcttgggcttcctggtgctccgcaggctggactggagcgccctggtccctctgcggctccgccatcgacagctggggctgcaggccaagggctggaacttcatgctggaggattccaccttctggatcttcgggggctccatccactatttccgtgtgcccagggagtactggagggaccgcctgctgaagatgaaggcctgtggcttgaacaccctcaccacctatgttccgtggaacctgcatgagccagaaagaggcaaatttgacttctctgggaacctggacctggaggccttcgtcctgatggccgcagagatcgggctgtgggtgattctgcgtccaggcccctacatctgcagtgagatggacctcgggggcttgcccagctggctactccaagaccctggcatgaggctgaggacaacttacaagggcttcaccgaagcagtggacctttattttgaccacctgatgtccagggtggtgccactccagtacaagcgtgggggacctatcattgccgtgcaggtggagaatgaatatggttcctataataaagaccccgcatacatgccctacgtcaagaaggcactggaggaccgtggcattgtggaactgctcctgacttcagacaacaaggatgggctgagcaaggggattgtccagggagtcttggccaccatcaacttgcagtcaacacacgagctgcagctactgaccacctttctcttcaacgtccaggggactcagcccaagatggtgatggagtactggacggggtggtttgactcgtggggaggccctcacaatatcttggattcttctgaggttttgaaaaccgtgtctgccattgtggacgccggctcctccatcaacctctacatgttccacggaggcaccaactttggcttcatgaatggagccatgcacttccatgactacaagtcagatgtcaccagctatgactactatgctgtgctgacagaagccggcgattacacggccaagtacatgaagcttcgagacttcttcggctccatctcaggcatccctctccctcccccacctgaccttcttcccaagatgccgtatgagcccttaacgccagtcttgtacctgtctctgtgggacgccctcaagtacctgggggagccaatcaagtctgaaaagcccatcaacatggagaacctgccagtcaatgggggaaatggacagtccttcgggtacattctctatgagaccagcatcacctcgtctggcatcctcagtggccacgtgcatgatcgggggcaggtgtttgtgaacacagtatccataggattcttggactacaagacaacgaagattgctgtccccctgatccagggttacaccgtgctgaggatcttggtggagaatcgtgggcgagtcaactatggggagaatattgatgaccagcgcaaaggcttaattggaaatctctatctgaatgattcacccctgaaaaacttcagaatctatagcctggatatgaagaagagcttctttcagaggttcggcctggacaaatggagttccctcccagaaacacccacattacctgctttcttcttgggtagcttgtccatcagctccaccccttgtgacacctttctgaagctggagggctgggagaagggggttgtattcatcaatggccagaaccttggacgttactggaacattggaccccagaagacgctttacctcccaggtccctggttgagcagcggaatcaaccaggtcatcgtttttgaggagacgatggcgggccctgcattacagttcacggaaaccccccacctgggcaggaaccagtacattaagtgagcggtggcaccccctcctgctggtgccagtgggagactgccgcctcctcttgacctgaagcctggtggctgctgccccacccctcactgcaaaagcatctccttaagtagcaacctcagggactgggggctacagtctgcccctgtctcagctcaaaaccctaagcctgcagggaaaggtgggatggctctgggcctggctttgttgatgatggctttcctacagccctgctcttgtgccgaggctgtcgggctgtctctagggtgggagcagctaatcagatcgcccagcctttggccctcagaaaaagtgctgaaacgtgcccttgcaccggacgtcacagccctgcgagcatctgctggactcaggcgtgctctttgctggttcctgggaggcttggccacatccctcatggccccattttatccccgaaatcctgggtgtgtcaccagtgtagagggtggggaaggggtgtctcacctgagctgactttgttcttccttcacaaccttctgagccttctttgggattctggaaggaactcggcgtgagaaacatgtgacttcccctttcccttcccactcgctgcttcccacagggtgacaggctgggctggagaaacagaaatcctcaccctgcgtcttcccaagttagcaggtgtctctggtgttcagtgaggaggacatgtgagtcctggcagaagccatggcccatgtctgcacatccagggaggaggacagaaggcccagctcacatgtgagtcctggcagaagccatggcccatgtctgcacatccagggaggaggacagaaggcccagctcacatgtgagtcctggcagaagccatggcccatgtctgcacatccagggaggaggacagaaggcccagctcagtggcccccgccccccaccccccacgcccgaacagcaggggcagagcagccctccttcgaagtgtgtccaagtccgcatttgagccttgttctggggcccagcccaacacctggcttgggctcactgtcctgagttgcagtaaagctataaccttgaatcacaaaaaaaaaaaaaaaaaaaaaagaggtttgaggaaggaanacattctgatgttg

SEQ ID NO: 7481 - DNA, 469 bp, Homo sapiens; identical to SEQ ID NO: 3506

SEQ ID NO: 7482 - DNA, 3048 bp, Homo sapiens
  misc_feature (244)..(288): n is a, c, g, or t
  misc_feature (656)..(675): n is a, c, g, or t
  misc_feature (3031)..(3046): n is a, c, g, or t
ggcacgagggtcctcccgcgggtccgagggcgctggaaacccagcggcggcgaagcggagaggagccccgcgcgtctccgcccgcacggctccaggtctggggtctgcgctggagccgcgcggggagaggccgtctctgcgaccgccgcgcccgctcccgaccgtccgggtccgcggccagcccggccaccagccatgggctctggcccgctctcgctgcccctggcgctgtcgccgccgcggnnnnnnnnnnnnnnnnnnnnnnnnnnnnnnnnnnnnnnnnnnnnntcagaggctgagcaccgtctatttgagcggctgtttgaagattacaatgagatcatccggcctgtagccaacgtgtctgacccagtcatcatccatttcgaggtgtccatgtctcagctggtgaaggtggatgaagtaaaccagatcatggagaccaacctgtggctcaagcaaatctggaatgactacaagctgaagtggaacccctctgactatggtggggcagagttcatgcgtgtccctgcacagaagatctggaagccagacattgtgctgtataacaatgctgttggggatttccaggtggacgacaagaccaaagccttactcaagtacactggggaggtgacttggatacctccggccannnnnnnnnnnnnnnnnnnnaatcgacgtgacctacttcccgtttgattaccaaaactgtaccatgaagttcggttcctggtcctacgataaggcgaaaatcgatctggtcctgatcggctcttccatgaacctcaaggactattgggagagcggcgagtgggccatcatcaaagccccaggctacaaacacgacatcaagtacaactgctgcgaggagatctaccccgacatcacatactcgctgtacatccggcgcctgcccttgttctacaccatcaacctcatcatcccctgcctgctcatctccttcctcactgtgctcgtcttctacctgccctccgactgcggtgagaaggtgaccctgtgcatttctgtcctcctctccctgacggtgtttctcctggtgatcactgagaccatcccttccacctcgctggtcatccccctgattggagagtacctcctgttcaccatgatttttgtaaccttgtccatcgtcatcaccgtcttcgtgctcaacgtgcactacagaaccccgacgacacacacaatgccctcatgggtgaagactgtattcttgaacctgctccccagggtcatgttcatgaccaggccaacaagcaacgagggcaacgctcagaagccgaggcccctctacggtgccgagctctcaaatctgaattgcttcagccgcgcagagtccaaaggctgcaaggagggctacccctgccaggacgggatgtgtggttactgccaccaccgcaggataaaaatctccaatttcagtgctaacctcacgagaagctctagttctgaatctgttgatgctgtgctgtccctctctgctttgtcaccagaaatcaaagaagccatccaaagtgtcaagtatattgctgaaaatatgaaagcacaaaatgaagccaaagagattcaagatgattggaagtatgttgccatggtgattgatcgtatttttctgtgggttttcaccctggtgtgcattctagggacagcaggattgtttctgcaacccctgatggccagggaagatgcataagcactaagctgtgtgcctgcctgggagacttccttgtgtcagggcaggaggaggctgcttcctagtaagaacgtactttctgttatcaagctaccagctttgtttttggcatttcgaggtttacttattttccacttatcttggaatcatgcaaaaaaaaaaatgtcaagagtatttattaccgataaatgaacatttaactagcctttttggtatggtaaagagatgtcaaaatgtgattctatgtgattagtatgctatgctatggaatatacatgtaaaaatgtttccttttagttgttgaaacaaaactggatagaaaaatgctgttcagaaatatgaaaagtcattcagttatcactacagatctcccagtaatttttcttatttagcccataatctctttgaaggtttatactaattcagcaatcccccatcgttacccatttcttaccatgcatttctcgttctttactgggtctaaagggctatgcctccatttcagagagcttcaactacttctcttgcatacttctaaattatactatgagaaatcatgcctagttattcattgttaatataactgtcttagtacaccataaactgggtggattataaacaacagaaacttctcagttttggaggttgggaggtccaaggtcaaggcaccagcaaatttggtgtctggtgagggtcctcttcctcaaagggtgccttctagctgtgtcctcacatgactgaagggactagctatctctgtggggtctattttataagggcactaaccccattcatgagagcagagcccccatggcctaatcacctttccaaggccccaccttctatctaagacaatcacgctgggaataggtttcaacatatgaattgggggaggacacatttggaccacagcatgaacctttagaacagggtttctcagccttagcactacggacattttgggctggataaatatgtgttggtacagaatgggggtatcctgtgcattgtaggatctttagcagtaccctagcctcaactcactagatgccaatgacataccttgcttcttcaccagttatgataaccaagaatgtctccattgttaaatgtccccttaggagcaaaattgcccctggttgagaaacattgctttagacaaattgttaagagtatcatgtactacacttctgaaacttaacgtgatcatcaccactgacagatgattcacagagagagactgtttgaatcttgtctcactagtttttcctgtgcaaaaataaaatggacagaattgcaaaaaaaaaaaaaaaaaannnnnnnnnnnnnnnncc

SEQ ID NO: 7483 - DNA, 1632 bp, Homo sapiens
  misc_feature (183)..(237): n is a, c, g, or t
  misc_feature (1327)..(1327): n is a, c, g, or t
  misc_feature (1330)..(1330): n is a, c, g, or t
  misc_feature (1370)..(1370): n is a, c, g, or t
  misc_feature (1379)..(1379): n is a, c, g, or t
agcggacggctggcaggtgactcgggcccgaggggcctcgtggggagcggccatgttggcttcgtcgctgaggactccgggcgggtcgggtgttgagcgaggcctcggaccttcggcctgtcgggggcgccctgccgggaattcggaaggagctggcggacatcactttagaccctccacctnnnnnnnnnnnnnnnnnnnnnnnnnnnnnnnnnnnnnnnnnnnnnnnnnnnnnnncaaccatcctagggcctccaggatccgtgtatgagggtggtgtattctttctcgatatcacttttacaccagaatatcccttcaagcctccaaaggttacatttcggacaagaatctatcattgtaatattaacagtcaaggtgttatttgcttggacatattgaaagataattggagtccagcactaaccatttctaaagtcctcctttctatctgctcacttcttacagactgtaatcctgccgaccccttggtgggaagtattgccactcagtatatgaccaacagagcagaacatgacagaatggccagacagtggaccaagagatacgctacataaattggggtttcacaattcttacattatttgtctgtcacagaagagagctgcttatgattttgaaggggtcagggagggtgggagttggtaaagagtagggtatttctataacagatattattcagtcttatttcctaagattttgttgtaacttaaggtatcttgctacagtagacagaattggtaatagcaacttttaaaattgtcattagttctgcaatattagctgaaatgtagtacagaaaagaatgtacatttagacatttgggttcagttgcttgtagtctgtaaatttaaaacagcttaatttggtacaggttacacatatggccatttatgtaaagtccctctaagactacatactttttgtttaaaacaaaattggaatttgttttcccttcttggaagggaacattgatatttaacagagtttttagagattgtcatctcatatatataaaatggacacgtggctataaaacaccatataagagatgagtagtgcgttttattttatatgccaatctactttgtttaaaaaaggtctgaatcaggacttgtgaaaacctgtagtgaaataccttaagctgttaactaactgtaaggcgtggaataggagttgctcagtggattggttctatgttgtggactacttaagtctgcatttgttactgtgctaataaacaatattaaaaaccacctaaaaaaaaaaaaaaaaaaaaaaaaaaagaaaagattagaacagtcanaanagaaaaaaaaattcaaaaaaaccatccaagggaaaccaanttacccaanaaccgggggggcttcggcaaagagggttcccctaagggggggcggtcttttaactcaacccccctttttttcatataaaaaggcccctaaagtggggaaaccttcttaacttggggcagctgtgggggcggctttataaaccttgtgggggggggggggaaacaattgtggccccacgcggaccttctttgggggaaagaacacgcctccttgtggggggggtgtaactgtttttgtggggccgcactccccc

SEQ ID NO: 7484 - DNA, 2941 bp, Homo sapiens
  misc_feature (1463)..(1482): n is a, c, g, or t
ttcggaactcgccaggggcgccgccggcggcggagggagcgtgactgcgctgcgcagggcgctaggaggcattgtcgccgctcaggcccttttgtgagaagcagaccagcctgggggctggcggcaggacacctgtgtctgcatgctgaagaagatgggtgaggccgtggccagagtagcaaggaaggtcaacgagacggtggagagcggctctgacactctggagctccacctggaggggaacttcctacaccgcctccccagcgaggtcagtgccctgcagcacctcaaggccattgacctgtcccggaaccagttccaggacttccctgagcagcttaccgccctgccggcgctggagaccatcaacctggaggagaacgagatcgtagatgtgcccgtggagaagctggccgccatgccagccttgcgcagcatcaacctccgcttcaacccactcaacgccgaggtgcgcgtgatcgccccgccgctcatcaagtttgacatgctcatgtctccggaaggcgcaagagcccccctaccttacgccaccctcctcatgcccacccagcaagggacagaggccacaggcctggaaccctggaagggagggaggcccatgggaggccaagcctgggggctgggggcgggtgggccgagcagcacgtggtgggtggggtgcagctggtctggatagatagcttacagcagtagtgggctctggaatgcccaagggaagaggcaaggtggggcctgcagcctggactcggcactcacagctgctgtgcaaactcaggcagatctcctgccctctctgagccttgtcacttgaaaaaaacaggaccctttccctcctttgggctccctggaggtttttaagcagtacgtgcctccagttacctccagatcagcaggcacaggtgggcattgccaggtattttctgagcccctgcgggtttgaggccttgtttttagtgctgagagccagttgctgccctgagaagagaagacaacctccatctatttattgcttcctgagaactgacctggatgcggccctctgcagggcccagtcttcagtcctgtggtccctggactggtgggaacctgaactaggagtcctgggagagctgtggtgggaatatgggctggcactgctgcagggcaagaacattcatgtaggagcccgaggaccagcaggctgggaatggggagcaagtcacgtcagctctgtcattccccacagttaacaaattggcggggtgggaagtcctgagtgctccgtccctctagcatcactcctgagctgcgggagaggtggcccagagaacagcagagtcagttacacctgcagctcttgtctaaagtgattagatggccaccctcaccactgtccagtccagcagcagcctggctgccttgtcatggcctcctgggggcagaaggcgatgtggaccacgggnnnnnnnnnnnnnnnnnnnncaggccaacgcccaaagccctgatgacctggttcttctgaggccctcaacctggcatcttagggtatggtcaggcaacagggtgaccagctgtcctggtttcccaggacatggaactttcaatgctaaaactggacagtacccagcaagtggggatggttggtcccctaccaggagagggcctggggctcttgcttcccgagaacgcctgtggcttgaagaaccttgactgcttggtcctcaggtatctacctcccaccttctcctcatctgtggagcaagccaactcagtgccccagaccccacctgatctgcatctttgtttgcatctccagagacacctgaggccccagagcttgaggcaaagccaggccgtccaaatcctgtgtgccgtggacgagtggccactttactactcctaaggctaagatgttgagagctcagaccactgctcagagcagtaatccctgctcagaatgctcccagttccctcgtccctgcccaggtctcttgtctcttgggaaggaactgataggtcgggccattgttgggccatcactgagcgctcagtatctcaagagactctgttcattctgctcgtatcccaaggcctggttggtcaaactctgggcaaagggttttcaggatgaggaggtcaagacaggatgtccagagctaccgagttcatctgtgggtgttgggggcaagtgggggctgaagtcctgtgcaggctgcgctggccccacctgccttgtgccctggagtggggtttctccttgttgaagaagaggcatccttctctgatgtgcacaaacacaatgtatgaccagagccttgcaactcaaagtgtggtctgtggaccagcagcggcagtgacacctgggagcttgttaggaatgcagagtctaggcctcaccctatacctcccgactcagaccctgcattttagcaagacccccagctgattcctataagcactttagagtttgagaagcaaggacctaggctggggatgtcctccgagcagagggtgaagtttctctcagttctctccctgccacttccagggatctgagcctgtgttcagcctcctccctaacccaccctgggagacacttggcctgttagattgttccagagtctgcatggcactcctgaagaagggagtgggacctgcagtcaccaggagatgagggttaggtgtgcccagccctccagacccggcctttctggttaacccctgcatgccaagctgcctgctgccccaggtcctcacctcaggcctttgaaggggcagcttctggaagttgttttctcctctgcttggagagtttgcccttgtctgtcttggaaagtgtgggcagccacagatgcccccaaatcagagctcacagtgagtgagcccctaagcttcagtctgcgataaagaatgcattggtttcaaaaaaaaaaaaaaaaaa

SEQ ID NO: 7485 - DNA, 2551 bp, Homo sapiens
agcggggggggagggaggcgttaagggcgcggcacttccgctggccgctggctcgctggccgctcctggaggcggcggcgggagcgcagggggcgcgcggcccggggactcgcattccccggttccccctccaccccacgcggcctggaccatggacgccagatggtgggcagtggtggtgctggctgcgttcccctccctaggggcaggtggggagactcccgaagcccctccggagtcatggacccagctatggttcttccgatttgtggtgaatgctgctggctatgccagctttatggtacctggctacctcctggtgcagtacttcaggcggaagaactacctggagaccggtaggggcctctgctttcccctggtgaaagcttgtgtgtttggcaatgagcccaaggcctctgatgaggttcccctggcgccccgaacagaggcggcagagaccaccccgatgtggcaggccctgaagctgctcttctgtgccacagggctccaggtgtcttatctgacttggggtgtgctgcaggaaagagtgatgacccgcagctatggggccacagccacatcaccgggtgagcgctttacggactcgcagttcctggtgctaatgaaccgagtgctggcactgattgtggctggcctctcctgtgttctctgcaagcagccccggcatggggcacccatgtaccggtactcctttgccagcctgtccaatgtgcttagcagctggtgccaatacgaagctcttaagttcgtcagcttccccacccaggtgctggccaaggcctctaaggtgatccctgtcatgctgatgggaaagcttgtgtctcggcgcagctacgaacactgggagtacctgacagccaccctcatctccattggggtcagcatgtttctgctatccagcggaccagagccccgcagctccccagccaccacactctcaggcctcatcttactgggcaggttatattggcttttgacagcttcacctcaaactggcaggatgccctgtttgcctataagatgtcatcggtgcagatgatgtttggggtcaatttcttctcctgcctcttcacagtgggctcactgctagaacagggggccctactggagggaacccgcttcatggggcgacacagtgagtttgctgcccatgccctgctactctccatctgctccgcatgtggccagctcttcatcttttacaccattgggcagtttggggctgccgtcttcaccatcatcatgaccctccgccaggcctttgccatccttctttcctgccttctctatggccacactgtcactgtggtgggagggctgggggtggctgtggtctttgctgccctcctgctcagagtctacgcgcggggccgtctaaagcaacggggaaagaaggctgtgcctgttgagtctcctgtgcagaaggtttgagggtggaaagggcctgaggggtgaagtgaaataggaccctcccaccatccccttctgctgtaacctctgagggagctggctgaaagggcaaaatgcaggtgttttctcagtatcacagaccagctctgcagcaggggattggggagcccaggaggcagccttcccttttgccttaagtcacccatcttccagtaagcagtttattctgagccccgggggtagacagtcctcagtgaggggttttggggagtttggggtcaagagagcataggtaggttccacagttactcttcccacaagttcccttaagtcttgccctagctgtgctctgccaccttccagactcactcccctctgcaaatacctgcatttcttaccctggtgagaaaagcacaagcggtgtaggctccaatgctgctttcccaggagggtgaagatggtgctgtgctgaggaaaggggatgcagagccctgcccagcaccaccacctcctatgctcctggatccctaggctctgttccatgagcctgttgcaggttttggtactttagaaatgtaactttttgctcttataattttattttattaaattaaattactgcaaaaaaaaaaaaaaaaaaaaaaaaaaaaaaaacaaaaaaaaggggggggggcaagaaagtcccggggggcccaagttagaggaacacacgctttcgttgtcaacgaggggcccaaaagggggcggacatacaaacgagacagagggcgagtaaacacgtgcgacgggcgaaccggccacgagacactgggaagaacccaaatgcgcggggcacaaagcgggcaaccacacagagagatttacggccagagggaaaaaaacagtcgagcggataagcggtgacccacgagacaagtggcgggggaagacgcgctcggatgttatgactacagaggaagcgatcaagacatactaactggcggacgcgagccgcagctagccgcgcacgcggacgaaagacatgacgagcagagactagaaagccgacacaacgaagaccagcgagccgaccatgactacaggattgcaagcgtcatgaccgaccgtcgtgcggggggcg

SEQ ID NO: 7486 - DNA, 2586 bp, Homo sapiens
  misc_feature (204)..(253): n is a, c, g, or t
ggcacgagggcagcgagtggccttcccggttggcgcgcgcccggggcggcggcgctggaggagctcgagacggagcctagttatgtctgggaggcgaacgcggtccggaggagccgctcagcgctccgggccaagggccccatctcctactaagcctctgcggaggtcccagcggaaatcaggctctgaactcccgagcatccnnnnnnnnnnnnnnnnnnnnnnnnnnnnnnnnnnnnnnnnnnnnnnnnnnagaaagcccatcgtcttaaagaggatcgtggcccatgctgtagaggtcccagctgtccaatcacctcgcaggagccctaggatttcctttttcttggagaaagaaaacgagccccctggcagggagcttactaaggaggaccttttcaagacacacagcgtccctgccacccccaccagcactcctgtgccgaaccctgaggccgagtccagctccaaggaaggagagctggacgccagagacttggaaatgtctaagaaagtcaggcgttcctacagccggctggagaccctgggctctgcctctacctccaccccaggccgccggtcctgctttggcttcgaggggctgctgggggcagaagacttgtccggagtctcgccagtggtgtgctccaaactcaccgaggtccccagggtttgtgcaaagccctgggccccagacatgactctccctggaatctccccaccacccgagaaacagaaacgtaagaagaagaaaatgccagagatcttgaaaacggagctggatgagtgggctgcggccatgaatgccgagtttgaagctgctgagcagtttgatctcctggttgaatgagatgcagtggggggtgcacctggccagactctccctcctgtcctgtacatagccacctccctgtggagaggacacttagggtcccctcccctggtcttgttacctgtgtgtgtgctggtgctgcgcatgaggactgtctgcctttgagggcttgggcagcagcggcagccatcttggttttaggaaatggggccgcctggcccagccactcactggtgtcctgtctcttgtcgtcctgtccttcctatctccccaaagtaccatagccagtttccagatgggccacagactggggaggagaatcagtggcccagccagaagttaaagggctgagggttgaggtgagaggcacctctgctcttgttgggaggggtggctgcttggaaataggcccaggggctctgccagcctcggcctctccctcctgagttgccttctgttggtggctttcttcttgaacccacctgtgtaaagaggttttcagttccgtgggtttcccctttgattctgtaaatagtcccagagagaattcgtgggctgagggcaattctgtcttggaggaagaagctggacattcagcctgtggagtctgagttttgaaggatgtagggagccttagttgggtctcagaccataagtgtgtactacacagaagctgtgttttctagttctggtctgctgttgagatgtttggtaaatgccaggttgatagggcgctggctgcttggagcaaagggtgcatttcagggtgtggccaccaggtgctgtgagtttctgtggctcatggcctctgggctggtcccttgcacagggcccacgctggagtcttaccactctgctgcaggggtggaaggtggcccctcttgtcacccatacccatttcttacaaaataagttacaccgagtctacttggccctagaagagaaagttgaagagtcccagacctactagcattttgcaactatgcttgtaaagtcctcggaaagtttcctcgcgtaccagacagcggcgggggctgatagcaattttagtttttggcctccctatcctctcacatgagaacactgcctggatgcatctcatgatctctggagaatttccccatctttctcttctttccatcgtgtggattcaatagtttggatttgaaggctgccctgcccccgactctcctgccgcacccctggccattgtaccttttgatgtttagaagttcgtggaagtagacgctgaggtgtgcagaggagctggtggataacagagaatgccagggaagatgagtgctgggtcagggtacttggatgaaacggtgcaggccaggcgggccctaataaaaccctctgccaggtctgggagtcccaggccatctgctcaacgctctgtggtttgtcagacctgcaagcaagccccctgctggggaagcctaggtgtccttgagctgaaccgcactgaagaactcttgtcctcactggctgatgcagcagaactcttgggaaatgtcttagtcctgcagaatcaggagtcaccagatgatgcagagttgagatcatcattgcaaagttctctgttcctgaggaactaaatttaaggaaaaaatgggattttgttttagagttggaaaaaacagcctgattaaagagtttctgcctgttcaaaaaaaaaaaaaaaaaaaaaacaaaaaaaaaaaaaaaaaaaaaaaaaaaaaaaaaaaagaaagggggggactctccgtaaa

SEQ ID NO: 7487 - DNA, 960 bp, Homo sapiens
  misc_feature (473)..(473): n is a, c, g, or t
tttttttttttttttttaagttgttaggatgtttttaattgtgatgatgaaattccagctcaagttaacttaagcaaaagtaaacaagcaaaattccaaaaagggagtttactttcttacataatttcagagaacaaagatgggtgtcttgctagcttcagtcatagctggacccaggtgctcaaatctctctctttctctctcttctttcttcattgtctgatagcttcaggcatacacagtaaaccctcagctcatgatttcagagtaagagagagcctcctcttggaccaacaactctagactgggaaatggggcaccacagttggccagacatgggttgcattcccccaaagccaggggataggttgaccagcagcttcacaggacccacatggggcagatgggatgcaaggctgacaaactatcagtgagactctgtggatagaaagcatgagtaggcgccaaacatntcacgtaagcagcgaatatgcaggcttcctctttgcatctcacccaactatgcttaaaatggcttgtctggcacactttgaggggtcagcctacttccttgcattcaaaaggtgaagagtttctaactctttgttcttgaatcaaaccaagtgactgaagactaagtgttccagatgggccaaccacgcagcagcatggtggcagctctgagatgctgcccagtgagccccagtagtcacatcctggagagtcccctcttcactgaataggacccatctggcaaccagtaggactgcagaaatgatgtccaaggctaggccataaaagacatggttcctgccttgctctccttgaatcacttcctcgggagcagccaactgccatgttgtaaggacacttaagcagctctgtagaggagtccatgggtgggaaactgaggcctcccaccacagccagcccacctgcaggcaaaggagcccacctcag

SEQ ID NO: 7488 - DNA, 3249 bp, Homo sapiens
atatgatgatccgggggcctctttgtatttggtgcctacttaccatgtactggggggcttgaggcaggaaggaccaggagcacctgggactcagaatttgagcttgtctttttgcccttgggcttcctgccctggagtcctcaggcttcttttctggagcagcaagtgtccagggacagctggggccttatctagaggcaccaggtccttgggtctttgactgccctgagctcagtagccccacccctcagcctacagccactaaaccccagaacctgggcccttccctgcccccattcctgcggccttcattgctgcatccggtggaggcccagctgggggccggtgctggagttacctctgctccatgccattgcagatggacagatggttccattataaacttcatctcctgggcaccaggcaaacctcggcctgtcggcaaggacaagaagtgcgtgtacatgacagccagccgaggctagactcagcgaggggtggacctgtctccatggtccagaagacttgaattcggagctggacacaggccctgagcctctgcccagactcctctcagggcatgaggctgagtgtgctgccagccatgccctgccctgctctgccctgggggtgactgccctcccctcccctttccgcagaggactggggggaccagaggtgcctgacagccttgccctacatctgcaagcgcagcaacgtcaccaaagaaacgcagcccccagacctgccaactacagccctggggggctgcccctctgactggatccagttcctcaacaagtgttttcaggtccagggccaggaaccccagagccgggtgaagtggtcagaggcacagttctcctgtgaacagcaagaggcccagctggtcaccatcacaaaccccttagagcaagcattcatcacagccagcctgcccaatgtgacctttgacctttggattggcctccatgcctcgcagagggacttccagtgggtggagcaggagcctttgatgtatgccaactgggcacctggggagccctctggccctagccctgctcccagtggcaacaaaccgaccagctgtgcggtggtcctgcacagcccctcagcccacttcactggccgctgggacgatcggagctgcacggaggagacccatggcttcatctgccagaagggcacggggctctcggcggtactcctgggtctcagaggagccgctgaactacgtgggctggcaggacggggagccgcagcagccgggggtctaagtacctacgtagatgtggacggggcctggcgcaccaccagctgtgacaccaagctgcagggggctgtgtgtggggttagcagtgggccccctcctccccgaagaataagctaccatggcagctgtccccagggactggcagactccgcgtggattcccttccgggagcactgctattctttccacatggagctgctgctgggccacaaggaggcgcgacagcgctgccagagagcgggtggggccgtcctgtctatcctggatgagatggagaatgtgtttgtctgggagcacctgcagagctatgagggccagagtcggggcgcctggctgggcatgaacttcaaccccaaaggaggcactctggtctggcaggacaacacagctgtgaactactccaactgggggcccccgggcttgggccccagcatgctgagccacaacagctgctactggattcagagcaacagcgggctatggcgccccggcgcttgcaccaacatcaccatgggtgtcgtctgcaagcttcctcgtgctgagcagagcagcttctccccatcagcgcttccagagaacccagcggccctggtggtggtgctgatggcggtgctgctgctcctggccttgctgaccgcagccctcatcctttaccggaggcgccagagcatcgagcgcggggcctttgagggtgcccgctacagccgcagcagctccagccccaccgaggccactgagaagaacatcctggtgtcagacatggaaatgaatgagcaacaagaatagagccaggcgcgtgggcagggccagggcgggaggatctggggagctggggccctgggtcagtctggccccccaccagctgcctgtccatttggcctatggaagggtgcccttgggagtcgctgttgggagccggagctgggcatagcctgggctggtggggtgccaccctcccacaagggctgggctgagacccagctgagtgcagcgtggcgtttccctttctgggggggcctgaggtcttgtcacctggtcctgtgcccccacaggaaccatatgttggatgggagggggaacgagagcctctttctccccagagcccccggcccaggcctgtttgatccgcgccccaggacccccttctttgcagagcccgaggagcctcccctgtcccctcgggcagatctgttgtgtctctcttcccacctggcagcctcagctctgtgcccctcaccctgctccctctcgccccttctctcccaccccttccttctgagccgggccctggggattggggagccctcttgttcctgatgagggtcagctgagggggctgagcatccatcactcctgtgcctgctggggtggctgtggggcgtggcaggaggggcctaggtgggttgggcctgagaaccagggcacgggtgtggtgtctgctgggctggagataagactggggagagacaccccaacctcccagggtgggagctgggccgggctgggatgtcatctcctgccgggcgggggagggctctgcccctggaagagtcccctgtggggaccaaaataagttccctaacatctccagctcctggctctggtttggagcaaggggaagggttgccagagtcctgggggccccagaggagcaggagtctgggagggcccagagttcaccctctagtggatccaggaggagcagcacccgagccctggagtggcccagtacccttccaagaggccacagtcccagccaggacaaagtatgcggcccatcctggtgcgacagcgtgggacaatgtgaacatggactcgaagacatggccctttctctgtagttgattttttaaatgtgccattattgtttttaaaaaaaaaggaaaaaagaaaagcaaacaaataaaacacctttaagaggcttgaaagagaaaaaaaaaaaaaaaaaaaaaaaaaaaaaaagggaggaagataaa

SEQ ID NO: 7489 - DNA, 2783 bp, Homo sapiens; identical to SEQ ID NO: 7241

SEQ ID NO: 7490 - DNA, 1386 bp, Homo sapiens
ggctatttagtagcttaggcctttctgtgctctaacagaatgaacttgcttactatatgatcttaggcaagccgccctcctccttccaagcctcagtttcctcttctgtgaaatgagggagaatccctactcctcttatctcattgtcttatcattgcattattcttacctgttgggatggtcaggtgagaggtctgcatgagggccctgcagactgtaacattttaagagtgtggggaaagcatggaaaaagtcactctagagatataaagggtgattactgctgttgttatatttattctgctacttgttaacacattctgcctaactcagaagattcagtttggggctgagggttgaaaacaggactcctagggtttgtcccagctgctcacttgctgtgtcactcttgttgtgttgtcgaatctctctgcctttgtttccctatctattcctgccaagatgatgtgtatattccacttagcttatcctggaggaaaagggggcggagctctatccacacaaggtggtgttattattattagcgtgacacataaaaaatattcatgtctacatccaggaactaatctcgcatttatcattctgtgcccgagtggacagatggtgaaagatatttttagattctgaaatggtaacttcctattcttggtaggaagcttcatcccccttttccttcagcctaaagtgggccagatgcccctcgactcactggctatccccccattcagaatccacttacaagaaactaatacttctcttctttgttaagcataaactgagtttccctcaaatagggcaaaaatggccatgggtgtggggtcccaggggagtagctagaattgctaaggatcccctcagctctatggtttcttggatatggataaaaggactagctatttctactatctcccatttgcaaaatgaggaggctgggatgagataagtttgtagggataacaatctaatagctcttaggttgaatgtggcttgtggaagtgttttgtgtggcttgcatagtattttaaaaacccagagtcgtagcttccctttaaaaaaattggatctagcagtatcaatcctgtaacaatttagaaagagtctatgtgctctaatttgtccatctttccctttgatcatatctgtactatttcacttagacatgaaagccctaatttacagttctataacaattattttattaaacactgactttgtaaaaaaaaaaaaaaaaaaaatataccacatttctccccattttttttcctctgatccctctctttttcctctggtggcgccttctccagttgttgttttattccactctcaccccatcgagtcacccacaaatactaattttataaaatt

SEQ ID NO: 7491 - DNA, 1147 bp, Homo sapiens
gcccctcttttggacaaaagagaggccggaacctttataaaacattcttttaggctctcttgaaagggagaaaggggagatttttggggggaggctccttgaggatgtttcgcgaggcgttaatttttccccgaatatgtaataccttttgaaacccctctcgcccgaagaaaaggggggcccgccctttgggcccatatggggggtaccattctggcaggttttggacatgggtggggtgtgtttaataatttccgaaaaggtgtggggtgtaaggaattaccttccgtaataaatccggctttctggggagtggaaaccagcaaacccaaaatcttcaaagttggaaggaactttaaaaatcatccggtccaatctctttcctctttctgccacctcccaaggcagaaatcccctcttcagcttcttttgtaggtgggaatccagcctctgttagatatgtccagagatggaaactcactcccctacaaaagatggagcttaatggagaaattgcaactttcattaaaaaacaaattcagatgaaatatcagtaactgtcttggacagtgctgaaatcaggtggttaaacgggtaaacaaaatatactgtattttgagaaatggcacaaaaacaggcagtcatctttaagggctatgcctaggcaaactactaacatgcattgtgagaatgccgtgtatacctcacgtactgtgtactttgtacatatattttaccttttatacctatgttcgattttgttttgttttgttttgttctggctttgaggcttgttttgttgtctgtgtctgtctgaataacctgcgtgtctaaaaccacgtgaaatgtgaatgattattggcaatattaccttgacagaatcatgggactttgagaagagggaggacagaggcctctgtcgcactaacgctctcgtggttgctcgactgttgtatctgtgatacattatccgactaaggactctgggctggcagggccttctgccgggaaagctagaaacactaggttcttcctgtacatacgtgtatatatgtgaacagtgagatggccgtttctgacttgtagagaaattttaataaacctggtttcgtaaaaaaaaaaaaaaaaaaaaaaaaaaaattcgtcc

SEQ ID NO: 7492 - DNA, 557 bp, Homo sapiens
ttttttttaaaatgataatcaatcataagtcattttatttgttatcaagttatattatcaacaggttattgtcatcaacagattaaaacaaaatgtctcaaaaagacaaaggcaaacacatactattgagagtaaacaatgaccgtcccaggctttccaaagcatatatatcacttacactcatggacttttttttcattttaaaagggcattttgcatgtgttttataactatgaaagtaatacatgctcattgcagcaaacttagaaaatgcagaaatgcacaaatatctgtcttctgtacaacactaactgctagctaccctacacagctgttgtttctcgctttcaaaacattctagtgcttttttataacgtgtgaagcgttcccccaattaagtggtctattaactggaagttcacaggcttctgctctcattcagtagcagaattggtcacacctgttagattctcagcctcctcctttgtcattgtctctcctctctctccaccacttccctctcccctttaagaaagacctatctcagccaggagcgg

SEQ ID NO: 7493 - DNA, 553 bp, Homo sapiens
aaaattttaggcattcagtataagttgcctatttcttctactcctgagttcagaagcagttgaaaaataaaacacagatcaatagtttttttagagtttaaactgtcagctttattattgataaaccaattggagaaaatgacattagatctgtgaaccaaagagcctattaatactctgtgactgccaactctctcctgtatccaaatacacatccaaagcctccctctgcacccaaaggaaagtttggagctgtctctagggaggaaaatgggaagtttacagtcctttgatagagttgttctaccccgttagcaccccatcaccacctagcaattaggtaattaatttctctgctggaaggagtgtgtgaggagtgagactacaggccaagagttgtatttcaatggaggtccttcaacacaaaaacatgagaccagggaaaggactttccctcccaacagtgctcaattcttttttttttttttttttttttttttttgttttgatcctgttctaccactgcacactgcgggtgagggatgcattttac

SEQ ID NO: 7494 - DNA, 1805 bp, Homo sapiens
  misc_feature (743)..(755): n is a, c, g, or t
  misc_feature (1199)..(1219): n is a, c, g, or t
  misc_feature (1724)..(1724): n is a, c, g, or t
caatcggataggtagtcataccattaacagatacttccttgaaggtagaatattatttcctttctttacagttttgtgttacacaagtccaagtggtgccagcaaacttcttaccgtgaaatgttgtaaaacacctggcatactgaaatttctgaaacaaaaacacaagctccacattgataacttgataaataaccactaaagtttagatgcagggactgagatgatacaggcaaaatcttggtgttggtttctcttttaattcgtatcttcgatcacctaacctttctcaatccaagagcagttcagtcttttctccccaagtctaggatgccaaagagcatcataggaaaagataattagggattgaccagcatttcaattagttctcttcttcatctttgcatttctcaaaagtgttctcctggaccagagagaaagagctggtccattttttttcattctttctattcaaatttttccacccagacaatactttattaacacagatactgtagatccttccttggtcagtgaattattacaagaggagctatccttccaccaaagtgagtgaaaacaagttccagtatcttttcttccatccagttttgttctcagaatccaagtcagtcctgggtcttttctcactttagaccctggcctcagatgtgtttattcttgctatttaaaaatacctttaaatttcacatgctgggctgggaaattggtccctggcatannnnnnnnnnnnntgcttgatggtattgaaaggtgactataatgagggaagaaaggaggaggtaaagagagaagaatttgtcccagatctgtttaaagtttcaaaatttaaaaagggacccattaaattatgggaaaatggctatagagtgtgagcctcctttgaccatatgctcaaagaccgtactctgccacctgccttccaggtagctattctagaaactcagtcctttgtggaaacccaactaccttttaaaagtctctttccagattccaaaaggacaagagatcagagagtcacatatacgcctcttgttttattttcttgctttcaccgggattattgccaagaaaatcgtagggaaaaactttaaacttttcttttcagttgatccctttgacatcacctctcatgtttaaaatcaggaaaacacacccctaaaatttgcactctcttnnnnnnnnnnnnnnnnnnnnnacacacaaatgcacactattaccgtctttcaccctgcgctatatttccaaagtgtattataatccagatattgccccatctcaaacatgttaagtcagactgtgctgaaagactttccagggacggtcaacagggtatatgttcagtggctgccctgaaatcctggtggggatgaggatcacgcttcatcatcaaggggatgcccatcccctgataagctcccagtccttttggaagatttctttgaatgttaattgcattttcagttttgctcatttcccaccccaatgttttgtctgcaacatcgcttacactggattctttctatttttattcctatcattaaatggtagtgctgtaaattctgcaattaatgttaaataaactgctttaattcattgaaaaaaaaaaaaaaaaaaaaaaaagcggccgcgtccttttttttttttttttttagtggagacgagttttaccatgttggtcaggatggtcttgatctcttggncttgtgatctgcctgcctcggcctcccagggtcctgggattgcaggtgtgagccaccaccccccgccgagactccgtctta

SEQ ID NO: 7495 - DNA, 1430 bp, Homo sapiens
  misc_feature (129)..(146): n is a, c, g, or t
agatactctctatagcaaaaaagggatgaatggctttcaatattcatttctgtttattttgtgagggaaaataatatatcaagaaaattttcttccacttagaaagctttaaagctgaagtagaggtgnnnnnnnnnnnnnnnnnncaggaagaaccactaggccactgagtcatacttgagcttttcttactactgccccaatttctaaatgtgcataaatacaatcactctcaattttgaagggctaattatctactttgtgggtgtgtttgttttttcttttcagcgtgtagggcttgggctctgtttccttttattagcatgtcacctgagggtggaacaaacaattggaaataaaatttgattattttatttcttataaagtattaatttcttaagggggtttgaaatcattggtaaaattaatatcagtacattatatgtcataaattttgattatctataatgtcttttcttatctaccacaaataattgagagttggctaaattcttgcagaatatatgggaaaaaaatcatagcaaagaattcagcttccctcaaaagaaagctatttttgtttccttcactccactaaatttgaaccagtagcacggatcaacacgacttctgcaatgagagtataacggtagctcttggtacagtcatattcatatttttaaatctttctttgaccaaaactattgcattgttttcattacattttgactgcgttacttattaaggccgaatgactttgacacccccgtggattatttttatgatcacatcaaatttaaacaatgtccaaagtgtaactttaatgttatattttgtttcaaaccctctggtctaagattattgagaaagatgttttttcctcctccctcaaatatgttatctcttcatatataaaaaaataagttattccatgcttttcaggaactgtaaaaattatttcaaaaagatatttgaaaaagttttctctattctggacacaaatgcttccatttatttcaaaagaagaagaagaaaaatggaatcttaatttaaaaaaatatatgtagtagtatctgctatgagatattcagtctctataaaaaaaaaaagggacacagcttcttttaaaacccttgtttcagtccatattcaacttcatggaacttctgaaacatcattcaattttgaactttatttaagagcatttttgtactgctgtctctgactgtcatggaaagttctgtaattctaaggtgtttctggttttatttttaatttcttcatctgtaccacagtcaaattagcaaccatctcccccatcccttgggctttctgtagatcagtggatgttaggtttaaacttctgttttctttgatgaagctttcaataaaaaatgaaaataaaatcaatagaaaaaaaaaaaaaaaag

SEQ ID NO: 7496 - DNA, 565 bp, Homo sapiens
gtttgttttttaaatttttattaagaatatttaataacagacaagcacaaatctcagatggaaataacaagattaaacttagggatacattatcaagaaaataatagtagaaattaagtaatctcagctctaagattacttagatccataagcaatcccagactatacttagaggtttcagtaagtaatatggctctgcaatgaacaatattttgagaagagaatcagcccaacaacgtggaactgttctgacactcacaggttggccataatcttctcctattgaatgcaaataatttcatataacaccaagaccagaaaataaccttataacccggttggagccagacttcatgcctgaggagacaatgtctaaaaaaaaaaaagaaaaagacaaaagagctctttttccttgctagtatgagtgaatgctgcttatttaccaattatagatttaatttcagtgtttttcccacttcttaaatgaaattcattaaaataatatagaattacccaattatctgaaagcatccaatccagagctaacctctacttcttgaacctc

SEQ ID NO: 7497 - DNA, 930 bp, Homo sapiens
cccacgctttttcacattcgggaagcgtcgggattaggtgaaagtacgtagttgtctttcgtaagttaaaatgataattgggccgaaacttactgccttacctaaaaggcagcgcagtcaggatattggtaggtcgggggcggctttggaaacccttaagtttacaagcatgcgcggacttgagtgctcattaggtcgccgggcgtccacgtgcagccctggaccctgaaccccggcgtgcgtgggccgtgggccctcggggaaaggttccgtgcactcggggactccggtgaagcctgttcagccgtctgtgtcatgtggccatcttgagtctactctgtcgctcttgtgccctagcaccccgagaaccgtcagtttgagccagatggaagctgagctgaacacattacgatggatgatggaaacataagactatcaagaaatccaagtggtaatgggcgaagtttattcagcatccggcaatggacttatcgtagttggggaaacgggtgttccgaataatatcctggaagttatcaggacacctattttaaatataggcctgaattttgtaaagtaatatttaaggtggtccgtgataattaaataaaatgcttaattcatgtggcaaaaaaaaaaaaaaaaaaaaaaaaaaaaaaagccccaagaggctagaggcagaacgggcaggctagcaacacaccatcaaaaatggggggggccgcctctaaaaatatcccctcgagggggccccaaagtttaacggggaccccagtttttttgtgtaaaaaggggcccccaaatgaggggggccgctattaaaaacctaagggcattgtggccccttcttttttaaacacccccccggaaccgggggaaaaaaagcggctaacctttggcgggaacttttggggggaaaggaaacccttc

SEQ ID NO: 7498 - DNA, 1877 bp, Homo sapiens
  misc_feature (575)..(610): n is a, c, g, or t
aattttcagaagtttcgtatggggatggttttatataaattcaggtttttcccacaataataaatgtatttagtctcagtgctcaatagaagagatttctaatagaaaaggattcaaactgtgaaaccatttctcttttaatgtttcacattcctgttacagatttgttctcttgtgactctgttatccataatatggacagttcttgagtcctaacattgagaggttttcccttagtgcatagagggaatgagtattaattggagaagcttaaagtattgccactttagcactgaagattgggatgagaggaggtgaaacctcactagaaaaagggacaatgttagtgtggcccttcctgatcatgtttaagaaaagtcatgaaaatggtgaactagtgtttccaagcatattggaagggttgagtgtatactgtctgtcaaagacttccagcatttccaggtcctagagaggaacaagactggtaacctgcctatctgtatttttaagaacccaggaggaaagctttataatagaacattatttctgtgtttatgtataaggggttttttgtnnnnnnnnnnnnnnnnnnnnnnnnnnnnnnnnnnnncaagtgcaatggcacgaacctcatagctcctggacttaagtgatctgcctgcctttgcctcctgagtagctgggactacaggcatgagcccccatgcctggctaagtttgtttttttgtttgtttgtttgtttgtttttggggggggttgttttgttttttgtagagacgtagtcttgctttgttgccaggctagtctgttgctggtggcttgcgtgggaggaaggtgactgtgaggagcagagtggtgtgtccaccgagcacttggattcagcttcttcatttccaacatggaagaaacttacaccgactccctggaccctgagaagctattgcaatgcccctatgacaaaaaccatcaaatcagggcttgcaggtttccttatcatcttatcaagtgcagaaagaatcatcctgatgttgcaagcaaattggctacttgtcccttcaatgctcgccaccaggttcctcgagctgaaattagtcatcatatctcaagctgtgatgacagaagttgtattgagcaagatgttgtcaaccaaaccaggagccttagacaagagactctggctgagagcacttggcagtgccctccttgcgatgaagactgggataaagatttgtgggagcagaccagcaccccatttgtctggggcacaactcactactctgacaacaacagccctgcgagcaacatagttacagaacataagaataacctggcttcaggcatgcgagttcccaaatctctgccgtatgttctgccatggaaaaacaatggaaatgcacagtaactgaatacctatctcatcaaatgccagaccctagaagactgttgcttcttcttctaccagtgggttctcattttcctcctaatctaattatagaatggtaaactccctgtgactttccaaactgacaagcacacttttttcctccccccttgaatcctcatttaatgcaagaaccctcatactcagaagcttccaaataaacctttgatacagaaaaaaaaaaaaaaaaaaagggtcgccaggggggaggttagggtggcccggggcgctcggccccctaacggaagttgggcccggacaggctccgccgcgagacggtaatggggcctggagcctaagcccaggtttctgctcgaaaaattaaagagctccccgcccggaacatgggagggacccggccggtctgagaggccgggaatccctaaaggcgcctgtcccacacttttgggcaaccgcgtgtgccgagagggaccc

SEQ ID NO: 7499 - DNA, 6234 bp, Homo sapiens
  misc_feature (4658)..(4658): n is a, c, g, or t
ttttttaaaagtcattaagagatcaagactgtttaatagttacttttttgagggaaatccagtcacatttgcctgtaccattacatacaccattacttggacattcacactcaattgggaacataaattacaaaagagagaggaacttttaaaaccacatttaatttttaataccaaatctgttgcactattacagaagtgaccctttcatgcacagataaatttcgcatctaccagtatggaagaggaaaaaatgtagttttattgttctcccaaaatattggcaaatttaaagtaacttttaatctttgtgctctctgatgccaaggcaaacctgttttgtctttttatattttcaagagacaggtggatctgtgaaaaatgaatatagagacatgaaagtatttagggccatctttacctgggattactttaaattatgctttacctacatatatcaaacatgccaggttactaggcctactgtgccccataggcaaagctctgaagatttcatcgaaaaatctgctgtcaatacgtagaaaagttcactatttcagtttcacagcaaaaaaggtggggggaggggggaacccaatagatatttaagtagatgctttccaatcccattcactgcattaattagcttacctcttatacagtacaacataaacattgcatgtttatttgtatgtaacacctataagcatatagcatctacattttaagtgtatttacaaattcaacaaaatatctacatataaaaagctttacttaaaattaaacttgatgcaagttatgagaaaccaatttattggcaaatgaaactgagcattccttcaaccataggttgttatagattttcatatttggaggtaacccatttgatagatattgtttatgaatacgatagaatatatatttactttttaaactgcagatgtaatcccttggaccgttggccttttaagcacttgcctgatttcttagattctgaaatgtatccataacaatttgcatacacgttgtttaatgctgcagagttttgaacacttacataggtaaagtcttggagaataatatattactgttggcatgctgttgtatgcttttagtgttggaataacttagttttaaaattaattttctagcatgttgacatctttcttactgcatgtaatagaaaccataaaggaccacaaaatcatcatgtgcttcagttggcaacaaagattttctttttatgcttatgaggaaatgctatttctaataaactgtcttatttttattttcatgtttccttcttttcccagcattgcagttttcatgaactctgctttttaaaagttacttttagacaatgacagtaatctaggacccagaatggactggaccagctgatacagaatgcacgatgttgtggaatgcttaatatctgaaggcactgtatgtgtcttgccctgtgttctctgaaataatgtttgaaatttaatttggatgatttgtttttgattctttcagtatggcacaaatgccgaaatgcactgcaatacacattgtttatgcctaaaaacaaccgaacatagaaatgatgtaaaaagtagaacactgtgctgctgtaatgcctggaagattaagaagcctacggagtaacaggagccaagagtaggtaatagttctcagtaagcatcagcaatgtgactgtcataatgaactcatttagcaagtatatactgtacaaactgttcctaacagtctcccaaaaagactaacgacagctatacatagtcaccaatttcacaacaatgtccacaaagacattgaagttctagagaatactacagtaacactcttgacaatgaaaacggaattcatatataggggttcagctgagggtagtataaacaaagtatcaaaccatgttttcataacatacacgggtatgtcctttaaatgtggagcatttttcatgcatcatattgaactgtatcctgcagaggaaataacaggatctgttggtgatgttgcattattttttatcagttctgaggaaatcaagaatacccattttgaatgaaaaagtatgcactttgcattccagttcatattaacatatcatttgactgagttatgtttttgctgtaactattctcataatactaacatacagcagaaaatatactctctacccatatgttcatagtatgagagggctgacaaacaagtgcttaggataaacattctagagaaatggaatattggcaaagagcttaaaaattaaacaaaggaattcatggcgttgacaggagaaggtgcctctgagctttcgtttccttcagccggctctttctctttcttaccactgtattgtccaataaaggagccatcctcattgaactggccattaaccccttctccatagtcaactaggctgtcgtcactatcttcttttttcacagtcctgtctgaaggagttcgacttccttttttcaaaggcttgtggtcttctgcatcactgtattctccaaatgtcccatcatcttccttcataggctggatttcagggtcagcatgggcatcttccttttctttaactggatatttaccacccttgtttcttctgatgaagcaaacaatcagcaaaattaagataaggagagcaacagcacacatcagaccaatgaaccagccctgagttgcaatatccacctgccggcttgccatcgcttcatccacagttgttactgcttcctctgtaatttgacttcctgatcctgctgatgtttgtgcatagaaataaaacttatatcgagtgctgaaatttaaattttttaaagtccaccgtgtcttgttggcaggaattttcaaatctaccagagggcctaattcatgtgtgctgttaattggctgatactttaaggtgtactctgtcaaaatgccattcgggtggctcggtggatcccattccaaagtgagagagtccagtgttggattcacaatcttcaaagacgagggagcactggggactccttctggagtattaaagactctgtcagggctggctgggccctcccctttcccattgaccactcggacattcagtgtgtagtggctaaagggctctagccccggcaacatgccatgagtcttgctgccttggaaggtgaggatctttttctcaatgtgacgtctgtttcttttagatgaactctgggtcttccaatagtaaatccgatagccttgtaggtgtcctcggatgcttttcagaggtactgggtcccagtgcacctcggctaaggtactgttcaccacattcacacgcacgttcccaggagccaccattgggaggtcttctccagaatgtcccatgactacagctggctcgggggcaaaccccatgtcattcagggcctgaactttgatcaggtatggaacaaaggttggcgtgcctgagacaatatatttggatacatttgccacaaccacagatgtccattcatcatcaccatctttctggcgccagctaactttgtactgaaggcctggcccattagattcgaaaccattcaagggcttccacgtaatcaccaaattatcaggctctgatcccagtccttccacagctgtggggtttttatctggttctgaggctttcgtcaaatactgctcagacgcctcgctgggcaagctcttcccaatgctgttcactgccatcacgcggaaggagtagttcacgtaaggagacaggttcagctgggctgtggtctgtgttccagaaacttcagtttggtggtgccacagccctggcttgtgcattgcatcttcatattcgatgatgaattttgtaatggggctattgttgtcatcgcctggggtccatgacagctgaacacttttgtcaagttgatctgtcagttctaagtcaaagggaggatttgggacatcgtaaacgggagctggagttggagtaggagcaacaacgctaagcacagcgctggcggagacgctgtccagagtggtgttggccacacacgtgtaggtcccgctgtcatcgtcactgacatcagctaccactagatgatccttgtcaacagtgaacctttcatcactgggcagttccctgttgtccttcagccacaggacagtgagggataaggtgtgatcatgtttcactttgcattcaaaggacaccatgctccctctttgcacaactgcatattcgggctgtttaacgatccatgtagcatctttgatttctaagtgaacttcattctttgccatccctaatttattccttgcaacacacgtataagttcctgtactgtccttttgggccacaggaatttccaaagttccattttcatgtaaaacataaatatcttcatgaagagcacttcctttagctcctttaaaccactcgatggttgggagaggagacccaaagaaggcacagtctagtaaagcaggcctgtttgcaatgacctggtagagtgtgtttgcaggtgtgaggattcgtggtggctcagccagcacatttacaaatgcgtttgccagtaaatatccatattcattagaggcattgcactgatagactgcacttgatctttcttgaacatttgaaaaaataatggtatcgccatctatttttctgctggggntacttttcacagggcatattgggactccatttgttaaccagctaattctgggtttggggttgccattagctctgcagatcaaggtcccatcctctcctggggacagcacaagattttgaggggctgtgatccagtatggagccgctttaactctaacagaaatggtatggtggatggctcctaatgcattttttgctatacattggtaatttccagagtctgcttctgaaacatgaatgatctgcaaggttttctcaaagttcttataaactgtcctgtttttgggtagcattccatcttcctttgcccagtaaataattggggtaggcagtccttctgcaatgcactccagtgaaagcacatttcctcttaattcctctttgttacttgcattgccttctggagttaaaaatgttggtggcctctctctacttgatttagctgaaatcaccttcacagaaataggttgcttctgctgtatggtttgagtatgattaaatctagcataacagatatagtcttcgcgggtgtcctctgggaggacattggaaaaataaaggtccccattcaaaccttgagaaactctctcactttgtggaagtctttgaaaggaattatccatccaaaatattataggtggtggtaatccaattgggggtctgcagggaagtactaaagactgaccactttgaagtgtgattggttcaagtttttctttggtccacaatggtgatctggatgggcggacaacaatgttattagaaactgcagctccgcgttcgttccttgctgtacactgatagactccttcataggtctcagctttcccttcgctcatgatgttaattatgagcgttcctgtgccaggcttcatggtgaccagagggtctttatcgatgtcaaaatgagtcccattacgggtccaggaaaagcttgggggcggtttccctttggcttcacactggattacaatattctcccgagggtcaataatgtaatcttttggagactgttgggtgatggttggaggctgtaccaagtcttcaagaagttttggatcaagaggtacttccagtgcactaatcatctggcacaggaagagaatcaggggcactctgcccgcagataagcgcttctttttcggcattattttaagctgcattagcttaactcctgctgagactcacacactgaatttccttttcttctttcacaaaagattttgtgaaacgttgtgtgcaagtttaagtaattttcatgcgggaaactttgaagaagctcttaagttgttcttccttttaattctttaaaccaaacgtcttcttagcattgctcttcagaaggtccactgggctagacacctcccaaatgtttttctgatttctgaagctatccttttctcaggagaatgccaacagctaagaccagctttggtcgaagtcttcagcaaacaggggataaagaatgctgagagagaatgtcacaaagattcgttctcgcgccgcgccctccgctcagctctggcgcgactgcccaggaccctggaccgccggtgtcctccgttctcgacgaagct

SEQ ID NO: 7500 - DNA, 2762 bp, Homo sapiens
  misc_feature (1581)..(1595): n is a, c, g, or t
gttggtttgtgttaaggagaccccgtggcatggacagggccagggcaggaccaggaccaggaccaggaccagggccagggtcccagccaggagagtgcagctgagcagggagcagtggagaagcagtaagcagccccccacctggctattcccgaactggacagcacctcttcaaccacctccggcttccaggacctttctcttcctcctcctccaattcccctcccccatcattctggtctttgagctttgagacgatgggcaggcatcagctgttggaaacctgggcagccctctcagtggcttcctatcctccttcttgctggagccatgaatggcaggagctcagtgcttcttgtgcagtgcctggacccaggtatcttacttggggtcttacttgtacccttacagtctctgagaaccagcctctgctgcaggtgagggttgggggcaggaaaccagtgctctgagactggttcctagcagccacctttctgtcaacctgtccggcttcaacaatattagggggaagggaaatgctagtagccttcccctctggtcccttgtgtggaggccccaatagtggtttggcgacccctcctcagtggctgtcatctagtccctgcgtctgatctccagtcatcccatgactcagagtgccttccactgtcttctctggcctctgcctgcccacagaatccaccatgcgtgaaccagagaggtccaccagcctagaaaacagcccttcagagggtcctgatgaggccttcctggactcagctgggagcaagataaattgcaactgagttgcagcttcaagaaagtaaagccagtaagcttgctggcagaatcaatttcttctatcccctcaatcctcccacccaccaggctggggcactttccaccaacactctaaactctactttagaaacgccctatcttcctccctgtcctccttcttggtctcacacttgggactcaaaaatgtggagtcaggacctgcctcctaatccccttacttctctgtccatctcccttccccagcatcgtgcatctgaggcatttgagatcctttttgaagtctgtccaggccttccttttattcctgtggggccagacaggggcttaggaagggccaaaggaccatcatgaggctaagttgccccagagccccaggatggatgggcccattttttccttattccctgctcagttttttcccctgctccttctctagtccttctttcatatttctccttctcatcttgaaaacaggatgttccctcttcccttgctgtcccatttctcccctgtgtccttatttctcccagtctctatcccctctcaagtccagggcaggccgatgctattggtgcttcttcactttgggacccagttccatatttgtctttagtgtatatcctcttcctgatacctccttcagtccctctctgggccccaaggctgagaatcagtgttaactgggtaaggatcatttgcttcctacccagctcaatctgccctggccatggggcttcccagggaaggaagaagagggaagaatccgaccactttccaatnnnnnnnnnnnnnnnccactaagcatcctaaaggtgaatgtgccctgtgccaatctctcctcaggactgagtcaacccccttcaacctcctcacctctctaaacaccatccatagtaacatgtgcattactggggtacctaggagtcaggacttttgacttcaggccagtcatttcctcccgatggggaaagggtgagatttacatccccaaatgcttgagtccctcagtgaaagaattagtttttgtttgtttgtttaagattttggggaagagatttgaggaggaaagaaaggagatggggtgagagggtttttaagtctgaaactctctgtcatgagctgtccccatggttactcaaggacaaggggggacagttttgcctacagctccagagacacagagaacaaaggggtgaccttcatttttcttcaagccggcctctgtgggggtctgtgagcagcttctactggatctttgtttggattctgtgtctgtatttataatttatttgaaatgtgctgggtagtgttctcatttgggggctgaagttagcaactgggccttcagctagggaaagcagttgcgggcagggggtggggggagattatattcactcctgccaaggactcccagcccaggactctctttagagcaaggaagcctcgttctctttcttctcaagaggctctcttgttctccatcaggagagccttgatttaggctacggcctcactctctatggccaccctaagaggaaaggctacttcacctcattacctccagagggctgggcagggccaagtgcctcataggactcatgttctctccaaccagggctggcatcactgctttgcaaagtggggcctgaggtagaagaaggtgtctggtttctccagctgctgtaggaggctaatgggcagggtacttgccctttgtcccactagactctaacccagcaccagggtgcccacctaggacctttcctggacatgagtttccttcactaaaaaagtcatgagcctcctacttctgggatttcagatcaggggtggggggagaatgttgcatgttgttttctggtgcttgttattatatatttgaataaacagtgctgcaagtacttgccatgaaggaaaaaaaaaaaaaaaaaaaaaaaaaaaaaaaaaaaaaaaaaaaaaaa

SEQ ID NO: 7501 - DNA, 886 bp, Homo sapiens
gtcggttccgggcgttaccatcgtccgtgcgcaccgcccggcgtccaggtgagtctcccatctgcagagacgcggacgcgccggcccgcagttggcctgcggagcgcggtggacggtttggcgcccaccaggcgatcaatactttggatttttaatttctagatttggcaattcttcgctgaagtcatcatgagctttttccaactcctgatgaaaaggaaggaactcattcccttggtggtgttcatgactgtggcggcgggtggagcctcatctttcgctgtgtattctctttggaaaaccgatgtgatccttgatcgaaaaaaaaatccagaaccttgggaaactgtggaccctactgtacctcaaaagcttataacaatcaaccaacaatggaaacccattgaagagttgcaaaatgtccaaagggtgaccaaatgacgagccctcgcctctttcttctgaagagtactctataaatctagtggaaacatttctgcacaaactagattctggacaccagtgtgcggaaatgcttctgctacatttttagggtttgtctacattttttgggctctggataaggaattaaaggagtgcagcaataactgcactgtctaaaagtttgtgcttattttcttgtaaatttgaatattgcatattgaaatttttgtttatgatctatgaatgtttttcttaaaatttacaaagctttgtaaattagattttctttaataaaatgccatttgtgcaagatttctcaaaaaaaaagtatatatttaaatggaagagaaaatatttttatgggagaaaaatacatttgaaccatgaaatttcatcttttaaataacatccagtacagatatctgtgtaaaaaaaaaaaaaa

SEQ ID NO: 7502 - DNA, 2651 bp, Homo sapiens
gtggaccatcccccaaaatgaatcccaacactggaagaccaagagggttgacgtttgctatcttgaaagctgcagcccccgtagagaagatcctagagcagaaggagcacaggctgggctgccatagcatggacccccaaaaagccactgtcatgaagaaatatcctgtgaagaaaatctttgcagggcacctgaactcccaaagccactgaggagaagatggaggccattgaactttcagtggatccaaagtctaacaaaagacaatgtcttgttttcgtcaccccccaaagaagaggaacctgtgagaaatattctggagaaatttaacaccatcagtggaagcaaggtgaggagtctctacctccatgcgcctcccctcctgcctctggagaggtagccctttggttaatggcaacccaatagggtaaccaaccatcccattttagcattgagagcattgtgtcctgggagacccttccctggaatgtaaataatcctggttttagaaacaaagtgtggaaggttggaggaaatgcacaaaacccgtaagttttagagggtctgaaagcaacattgtctatcaaatggatacggcacagattattcatctttacttgttgtcacccatttgaccactgatattggcaaccataatttgtagttcagaatggtcatccatccatcgttgcatcattcaaagtgatgtggcttaagtgtatataatgattattaatagttcatcttcgactttgcctgtggattaattggtgtgctttgtaacaagatagtgctagtttaattttttaacattgtgaatattgtgaccatgttttctaagaggtcagataatgagaatggttataataccaatgcaaccatgaccccatcactgaagaagaaggctaaacgactatgtaattttgatgatggatggaaggacacatactactgaactaggaaggtaaataaccaaaacatagcatactacataatgtacagaaaaaaatttgagattggacatggtggagaaggggatgtgcaagcacatatggagggcaaatctcacaagtaagatgggacaggtgaatgcttctaaaccaatcaaaaatacctttgtttccccaaaagacaccaatgctcagtcaaaaatagcagctgctgaattagcatgggcataccaggcaaataagcctgcattgtcatagcgttcccttgattgctctatgaaactgagtaaagtttcatttcctgattcaagaattgcagctaaaatatcctctggacaaagaagaagggaaattttttgataacagatgtgttgactccttacagtataaagccaatttctgtcatatctcaccaacaatcctggtttctacagtacatcaattttaagtaatgtgccaaatcatggcagcaaaaatatgttccctctagctgttaggtactttgacttgaaaacaggagtttcaaatcatcttcttcatttctgtgaggattttaatgaaactgctgaaatcataaaatattgttgatattttgtctaaatacaaactagacttagctcatctatctgtgtattcgtcagacagtatagatgtaaaattttggcaaattgcattcagtctacaaacttcttaccaaagaaaatgaaaagatcttatccattcaatgccttgtacatcttatatacaacactgctaaaaagggatgtgagttgcttaaatgtgacattgagactttcataatgaaagcttttggttacttttcaatttcctcaaaaagtgcaaaagcacttatggagatttttgacttcacagaaatggaaggtaacctctttagacgtgtgcctgcaagatggctgtcattgtagtgagccatagaaacgatgctaaaatgttggcctgccataagatcatattttcaaaggacaagaataatgtcctttgacattgtttgaaatctgaaaggagaaaaaaatcaagaatctgaagtgggccttaaaaaaaatcagtaagtcccttgtgactctgatttttatgaatctgtctctcaaaagccagggtgcccccagaagaactgagacaaactgagtttctgaacatttgaaaatgaggagcaggctcaggatccacagggtgtaaccatcccgtgaggccctgcctgagcagccagccagtcagtgaggctcttcaccttacttccatttctctgattccacctatgtacaacttacgaaaacttgcattattatagactgggagttcttaaattggaatctgtgaatctaaaggggccagaggatagaaatcaggaaatctgaaaacttcgatggaaaaaagaagtttttatttatttccatcaggaaaataggcaacaaaccacagcagtattagtacctgtgtctctgtcatcactaggaatcacagatatccacgttacagatatcttaaaatatttatgtacagcacccctctgaaattatggtaataattagatccaccccctaggtcttgtaatctttaatatgttaataaagaagcacatctattatgtgacagatttaaatgtttaagaatttgatttcaatgaaattgcatttcaataaaattggcttcctttgcaaaaaaaaaaaaaaaaaaaaaaaa

SEQ ID NO: 7503 - DNA, 790 bp, Homo sapiens
  misc_feature (238)..(268): n is a, c, g, or t
aaacatggaataacaggactcatgggtgtatccataaaagcaactgaattttagtcttctgctgttaataatctgttccatgaggatagtcttcctcttccacagaatgaaactcaggcagtcctataactttttattctctcaggtaatagaaaatcctgttactttaagaggaaaaaccctgctcttaattcagtaattcaaatcttgtccccttccccaacagggtctcctatgnnnnnnnnnnnnnnnnnnnnnnnnnnnnnnnccccgatgtcaccctcccacagcccacttgctagcaggcaagagaggggtggaggccggcagtaaggcatgtactgaactggacctctggtggaatggtgtcacccacgctgggcttgactcttaccatcagggtcctgccaacccttcagtgagactttttccgaagaatcccttttaaaatgacctcaagctgaccttcctgatgcagattccacatatggtatctgagactcacacagtgtggttggaagatagcacagtgacctcccaggcacagccctctgccagccctccactggctgccctaggatgctggccttcctccgatgggagtcgggcccagtctgctgtgagccaggagaagccagcaagctccctgcgaggcctggaggagcccttctcactcagcttggtgttcgatgccagtgcccccgcccattgtggggtgagggtgggactctcagcacagccctgtccaaataaatcctctaaagccctcttcaaaaaaaaaaaaaaaaaa

SEQ ID NO: 7504 - DNA, 2437 bp, Homo sapiens
ctgggagttgcataggagagatggatgtgtgtaaacattatcactaaaatgataaacagaatacccattagaattcttagaactattaatgatcaagaggggtggaggcatttcttggtatcaaataactggttaaggttactttgggcgaaatctatttcctttttgtttttgttgttggataacaagaaatgtctagacctaatattcatcagttttacaaacataatgaaaattagttgatttttagttgatttttttgtcccaacattttttttaacctttttaccactcattatatgtttgcagttctaggtctttgacagctgaagaccacaggaatcaaacaggcgagacacacagaatactgacccttctttacgcttttatagtgtttataccatatggcccagtgtggaattcttgattatccaagtgcctttggtcatttgtggcaggaaaacttaatagtttttagccagcagtgccacagccagcttttactgcaatacctaaagggtcaagtagtgtttttgtaccactattatttcaaatttaagtattctgccatgaaacgatccatactgggctggaacttgacatgtgaaatctttaatactaaagcttatctctgcttggcagctttttaggagaataatgagagttacaattttgactcttgcgttcctagaattcaaatggcatagctttctgaaatgagtatttcaagtttagtagtccgtataggagtgttgtgacttcaatttcagtgttcttgttaaaagaaataatatgatatatatatacacacatatatataacttgatgccagttttctagtaagcctcagtcttttattcactactcaatgataatgcattgtacaaacactgtcacatgagtaaataaaaatgaataattccttagaagatggagagtgttaaattatatttgtgataggaagcttagacatatcttttggttattagcttccattgccaattgtatttcagatgcatagggttttcttcccaaaaatatattgttaacttttatagctaactagcacctggaaaaaatgtatttgtacaactttactattgtatatagttttataataatgaaaaataaacccaatggccatattagaatgcaatttcgacatacagcttatctagatagttttccagaggattttgaaatttggcttaactgggaggataactgctcagcacaccactgaaacataaccactgacaccattcatttattttaactgagattcttgacatttttctctcctatgccttgttactttagcatacttgaactcacataaatgcttctttggattacatgggctatctgattccattttggatctgattgtccatcttgaattcaatatggtattcatctggactattcaaaaattatgccatttctagtctgtgaaataagatgtaaaaaatctttatttttgccctttggtaaaaacctatgtgacaacttttaaaatgtgaagcaacatctaatatagttgactggtatactaataggaaagtgaaagtatttcatgggtactttgtcacagaatgtgaaaagaaacttggcatagtggcctttataatgaggcatccacttactcctctgaagtgaagtctgtagcttagcttgtgtatagtttttgaaagaaatctcatgatcttcgttcattctcttgccttctcttttatctcatatggcacaagtagagggggaagccaggaggaaattcatcaccttgctatgcttttatttgatttttaattcctgagtgcctaaatgtggtgaccggcacctcacataactttttgagattcttgatgtcatttttatccttcctgtcaaccagcaatgtatttttatgttactaaaaccagtaacgtcataattgttgagggcaagcttcattgttgatagtgcaaagtgtcgctgttgtgatgtgtgtttattttattcaagtttgaatattgacaagtgtaacttaagctggtgactgacacctattgatctgctgtgtgcaaatgatagtactattttttagaaaactcttaagtaaattttaaaaatatttgaatacaaaatatctgagcaattttgaactcaaaagtttttcattgttttaaggattgccacaggactctttaatggtttttaatggacatacatgcctaatatttattggtgtgtttaaaatattttttgatagagtgttatgtcttaagcgcattagaaaacaattgtttgtaatggaatcaaagtgtttccctggacagtttgatgtgcttatggttgagatttataatctgcttgtactttgctttttaacttattaactgtaaataaattttagagaatacaaaaaaaaaaaaaaaaaaattaaacaaaaaaaact

SEQ ID NO: 7505 - DNA, 2163 bp, Homo sapiens
aagcacaaaatttatgtctgctggctgactggaagcaaaaaagtcaagatggaatatgatgaattccaacacaatggggcaccaaggcctttaggcctctctttttattttgctttggttttgtttgtttttctttagagacatgctctttctcatgggacttgaagtggactcatctttgtgcagtgctggttttgccatactcatttcaagtattatagacatatgtaatggtgaaaatatatgaactgtggcctttttcattcttgttacttgtgatgcaattaagtgaagataagaaaaaaaaaaaaaaagcagagatttaccatgtatcagtgcctggctttttgttataaagctttgtttgtctagtgctcttttgctataaaatagactgtagtacaccctagtaggaaaaaaaaaaaactaaatttaaaaataaaaaatatatttggcttatttttcgcaggagcaatccttttataccatgaatattacaaaaaaattgtcagattctgaatatttcttctttgtagatttttggaatcattatgagtaaaagtttgttactttattttactatttaaaagatgttattttaccatgtgttaccaagatgaaactgtatgggtagcttttttgtttgttttttgttttgtttttgtttttgtttttgtttttagttgtaggtcgcagcggggaaattttttgcgactgtacacatagctgcagcattaaaaacttaaaaaaattgttaaaaaaaaaaaaaagggaaaacatttcaaaaaaaaaaaaaaagataaacagttacaccttgttttcaatgtgtggctgagtgcctcgattttttcatgtttttggtgtatttctgatttgtagaagtgtccaaacaggttgtgtgctggagttccttcaagacaaaaacaaacccagcttggtcaaggccattacctgtttcccatctgtagttattcgatgaagtcatgtacatgaccgttctgtagcaataaatgtgccatttttataaactgtttctgacacttgtttcatttcattttgcattgtccatatagctatgattctcttctgtaagtaaaacgcatctatatttcattttccaagtgttggaggtattgacagcttaacaaacaaaacatacaaaaaaaatcacaaaaacaaattgaaaagcaaagcacatgattgatcaaggaagagatgcccttaatgaaaatggaacgggatgcatgcaaaacaaaaagaaaactgtctagaggattaactaattgaaggaatataattaatgtgtgtgtaacactgaagctatgcatttgaagagctctgaactgcaccagtgttttcggttgtgctgcaggttgctaagtcaagtcagccttaaccttttgcaccagttggtcggctgtttggcagaacattctcagatcttttcagtcaaaaatctaagatgatttattttgtatcactttgttaaaagctgaatattgttaactacagttaatattaacactgtatttatactttctcaaactacacccgccccaccacttctggttgcctctgttgactattaatccagatgtaaacaaccagatgtttttttctaacttgtacaaactgacgtgtgtcaactatcatggaaggaaaaaaatgtacagattaaaattattcagtgttatgtactgtaagttaatatttttgtagaatggacatcaatctactttgcaaaatttggaggctatttcaacattgcactgtagaaatgtaaagtaatgtatgcaatgtaaaggaaagcccgcggtagctgagcgcttcataacagaatgttctaatcaagtacgtggtatttggggatgtctccaatattgctcttgtattctttctaattgggtttagtgactagttgaaggaaaatgttataacgccatttggttcacatgtgaagtgccctccatagccaaatgttgggattttttttttttttcgtttttggttggactgtttgcagatatttaaattttatgaaatttccaaagattttggttgataacccccttttaccttctaaatgatttgagatgttcttatgttcttactgtgtgttttaaatatatataaaagagccacaagcaaaaaaaaaaaaaaaaa

SEQ ID NO: 7506 - DNA, 420 bp, Homo sapiens
ggctcctccttcttcttcatccagagctgcagcaacattgctgtgccagccccttgcatccttgccatcaaccacaatggcctcaactttctcagcacagagactcatgtgagtggcctcagctctgcactgccatcgccaccctctgttccctggtccccaaccccctccaagaggccaagacctccagccgccgaagccccagttcccactgcttaccaccttcatgatctcaggcaagtctcttccctcctctgagccttgctttcctcatctggaaaatgaggataagagttgagccccacccatagggctgttgtgaaggtgagatgaggtaaaacatactctatgcactcaaatagtacatctgtgtgcttaggctgccataataaaagaccacagactgagtaaattaaaaaa

SEQ ID NO: 7507 - DNA, 829 bp, Homo sapiens
caaagaccataccctccctccccctaatatctgcaaaagaacagggacgccaaagcatgcacacttaaacacaccttgagagctgcttccgcccctagaacggaatccacaaaagcagtttgcatctcctgtgtctgctttcatgaaattggttgaaatctaaatctgaacaaatctgcttgttttgtgaaaatccatatactatttgtaaatttgtgggttgtctgcccttcccaaagctcatacgttaatgaaacaatgatcaggacctactcttcttaggacttttcagctgatttttgtggtttcacaacagtgaggacagcatgagacacatcactgtggggatgttgatggataaatgcccaattattttacagtagggaagggttcaaatgctatgtttacaggacagggtttggaaacagggagcccttactatcttttatttcattccatttgagtacttactgtgtgcaaggatatttttttttttttctcaaaataacccagcgaggtaggtactacattcctcatcctacagatgcatccaaggctcagagagggccaatgacacttccaggttcacatgaatacagacattttcagtctgtctgactctaaagactattctaagctgtttctctaagtatttttaactatatacttttaattaaggaaggaatagatggtccttaggaatggttggtgttgtaaaaatttctttgcaggcgcaacccactgtggattgaaactgtagtttcttgtggaggttttttgtcaccagaacctctcttgagtccacttttccaggagctgggcacactga

SEQ ID NO: 7508 - DNA, 2545 bp, Homo sapiens
  misc_feature (1327)..(1352): n is a, c, g, or t
cagctccccttccttgcccgcctctccccccgccgccccaccagttaaacggatgaccaaagacctttcttatgccggaagcaaaaaccaaaactttttgttggctttttcctttgtcgcctccccagcacctgccctcccagtctcccaccccggccccaggctggaagccctccctccacttaagttgttgttttaaaccaaagtttacagtgtctgttggtggccaagaccttctctctccacccctcctccatccaccctgaggaccctggggctcagtggaggcagggccctgcccccctcccttccgctcctgcccagcctgggggaaggagaaaggaggggagaaagcgggctctcaccccctcaggagtgggcacgggagcccttctccctgaccctgggctgcttcctgggggctctccagacccctctctaggaccaagtcacccgtcgtgctgggagtgtggattctagcaaaagagctggaaaaaagtcagactctccacagaccccctatgggggacccccaactcaaggccaaggactgggcgtatcggatgctcataacacccctggcctggcccctttactgagaagactccttggatatttcccaagaaccccccacatacacccctcacaagccacccctcctgagaggcagggggccctccgccccctccccatgtattccccacctgtgttccgtttgaccagcacagaaatattaaacgtcctctattcaccgggccctgtgtgtgtcaccgaggtgcgggaggggaggagcattaaagctgaaagatcgctctgctcggggagcctgggcagagcagcagcaacgtgagggtcgctgtggtggtggtttttgtgagtggatggaatgagcagccctgcaggggcgctgggcatgtgccctcactgtggacagggcccacccacctccggttcccctgtgcctcctgtcccttccacgcttaaacagggttctctgtcattttcctgttttcttccagagtcccaatcctttgccctagttctttcactagtttgaaatccaagttcttgccagagtgttggagcaaggcagctgatttgctgcagggatggagaggaccaccgccgcagggttcttttacctgtgccaccagctctggagacatccacacccattcccaggtgtccttccaggcccattgtccacgtcttcaagggggctgcctggataggcgtgtgtgtgtgtagtgcccaggtgtggtggtggcatcctgaagcagtaggaccattagtgtgcgtgcacacccacgtggcacactgtgtggtnnnnnnnnnnnnnnnnnnnnnnnnnnggcggaaacgggatcattcaacctatacaaaggggaccctggataggctgcaaggaaagaggccaagggccaagctgctaagccaaagatggcccctgacacctcccccagccccagcacaccagcctgcacctcttatcccgtgttaagtcctggttccccacctgctgcccctcctcaacacagagcccctcccgccgcctcagacccctgtgcacatccccagggcctcagccgtctcattggtctttattttttattttttttaagatggagtttcgctcttattgcccagactggagtgcagtgatgctatctcggctcactgcaacctttgcctcccaggttcaagtgattctcctgcctcagcctcccaagtagctgggattacaggcgtgcaccaccacgccgggctaaatttttttgtatttttagtagagacggggtttctctatgttggtcaggctgatctcgaactcccgacctcaggtgatccgccagcctcagcctcccaaagtgctgggattacaggcgtgagccactgcacccggctctcactggtcttacgccaccttctggacactccctccttgagggcagaaaggagtcccaggcctgtccctagggacaaggcccagggaagagtgtatttggggagcaggggaggggagggtgttgagaaagctgaactggagtcaatcacccttcccacaaatcaccaaactgctggaactctccagccaaatgctgggagaaggacctggagggtgagtctttgctgacctctctctactctcaggcatgtcttttgtccttttcgtccatctatttctgtctgtcgctcactcgccccgctttctctgtctcaccttcatccactctgcaggcctgctccaccacagccctaatcctctggacgcttgtgtagggcctggggtgaattccctgtcccccatggtacctcgagaggggctggggagctcagcttggtctcagagtctccccaccagatactgtttaaaaaagtagcactgatgtgttttgtaatctgcccctcccagccctccgtggaggctgccagggccttgtacggtaaacctagctgcatgtaatctgtggacaatggcattctctacaatgcaataaaaacaattacccatgaaaaaaaaaaaaaaaaaaaaaaaaaaaaaaaa

SEQ ID NO: 7509 - DNA, 3889 bp, Homo sapiens
  misc_feature (993)..(1003): n is a, c, g, or t
gagtcaccgcagtggctgagctgctgacaggaggcggcagcggagtaggaggcgaggcaagacctgcggctcggcccggccacagccgcggtagtgctaggcaagcccacggagtcacgccggcctcagccagtctgcgaacctctcgcccccgcccacccctgcatccgcccggcccctgcccgcccgagtggtccggggaggcctagtctgcaccacccgccgggctcctggggccgccgccccgcgcggtcctgtcggcgtccgcggccgcgcccggcccctggcccgctcgcccgccggcaccatgatggaggagatcgaccggttccaggtgcccaccgcgcactcggagatgcagccgctggacccagccgccgcctccatctctgacggagactgtgacgcccgggaggagaagcagcgggagctggcccggaagggctccctgaagaatggcagcatgggtagccctgtcaaccagcaacccaagaagaacaatgtcatggcccgaacaaggctggtcgtccccaataaaggctactcctcacttgaccagagccctgatgagaagccactggtagcccttgacacggacagcgatgatgactttgacatgtctagatactcctcctccggctactcctctgctgagcagatcaaccaagatttgaacatccagctgctgaaggacggctaccggttagatgagatccccgacgacgaggacctagacctcatcccccccaagtccgtgaaccccacgtgcatgtgctgccaggccacgtcctccaccgcctgccacattcagtagcgggcggggccactgcggtcgccggggcggggccgccaagggccgggtaggacgggcagaggccgaccccttcccagctcgtctgcctgcccccggccccgcgcccctacagccgccaacctcgtataacagtcattgcttcctcctatggtaggacgtgtacctctgtgtgttcatgnnnnnnnnnnnaccaaaactgggtctctctccacccgggagctgaggaggggtgggggccgtttgttcagttacctgggggaacctcacccagcaccctgccccgcttcccagggctggccaagagagaagactggacggcagggaggtcaacattaacgagtggggggatcacaaagccaggggcttggccccaccccagcaaagccatgaactcccaagccccggcctcagcctaaccaggaaaggggctcggagggagaaaggcccagggcagtggggacgggtcccagcacctcggagcccccttcacacgccccctaccggcccatgtttctatttgcatttccccctcctcagatgggaagcctggcaaagctgcccaaccgggtagtgcccctcacccatcggatcactgccttcttcctcctcttgccccattcacccgcttccttgcactctgggagtggggcagggtaaggtgggccttacagacaggctgaggtttgggtggtgtgatctgtcctaattggcccctcaccaatgcatctatctgtctgccaccagcccaccccaccctgcccccaccctcacccacgcttctgctcattggtctcaatcccagcctggaagcagggagtaaggctggactccaatggcccattcccctcaccccagcccaagacgtgggaggctgcttcccagtaagaatccaggagcaagctttggtgaatccagtgggctgagtggctctatggatgtggttgtttggatgtggtagggagtgcttagcagaatgtgtgtgtatctctgaggctgtcagggggtgggtgggtgtgtgtctctgttggacctgtctctcctcagtctattcctgtcatagatgtgggtgtccctggtagggaagtgcctgtgtggtctgtttacagtgcagaaggcggctcagcagtgcaatgggctgacagccttggaccgggagtcagaagcctgggttctggttgtagctctggcccctccctgtgatcttcaacaagccacttgctttctctcgtcttcagtttcctcaactagaaaatgaacagcagctgaaattatgttgaagatccttttatacctgaaagagtttcttcatagaaatttctgtggtggggagggggcaatctctgtgtgtctcagtatacctaaaggttggggtggggcggagttgtgtgtctctgtagaaaggcgaaggggcagttcctatcaggactgtgtatgtctgagcacatgtggctctgtttgggattacgtgtttgtctgtgaatgtgtgtgtgtgttggagggttgtctattgtgtgtggctgtatagggtgtctgtagatcaagatgtgtatacagctgcttctgctattgctggtttgggggaggggactggaaagctgagactgaaaatcaagagggaagaggtgaggaaggcccacccctggggctgggcagtgtagacctgccaccgtgtgaagaaaaatgaaagcacagatagcctaagactgcacaggcctgtgcccacataccttatagcacaggcccaggtggatcatctcatgctaacaccccacatgtgctggtggatccactcccatggatccactcacatggctgcaaggcatgcaggtagactcacccacagcccactctctggacaccaatcctgggaggtgggagctggaatggggagcaatgagaggagggagtgagactgttggcttaggaagggtggtacctctccctgcatcatacccaggaacttccagctccaaaatattggggtacagctcaccaccccccactccgccaacccattcctacctcctctagtgcagggacccaagttagatgatgagaaaatgccaaacaaagggaggcaaggacagagaaggtacctgcaggacccacaaggcccatactggcccccatctgaacccacctctcccacccagatcaacatccccccaacccctgtgcccccatcatctggaccccagagccagccctcccactaccaccaccaccaccccggggctccttggctcacctttctagaacatgggtacctcctctttttgggggctcatttagactgctgcctttgctgctgacttgcagtgtgactcgggcccattgttcaatctctgtggccctgagacaccagggaaaatctccccccccacaggacatactagttccctggcaggcaagggcttccaactgaggcagtgcatgtgtggcagagagaggcaggaagctggcagtggcagcttctgtgtctagggaggggtgtggctccctccttccctgtctgggaggttggagggaagaatctaggccttagcttgccctcctgccacccttccccttgtagatactgccttaacactccctcctctctcagctgtggctgccacccagccaggtttctccgtgctcactaatttatttccaggaaggtgtgtggaagacatgagccgtgtataatattttttttaacattttcattgcagtattgaccatcatccttggttgtgtatcgtgtaacacaaataatgatattaaaagcatcaaacaagccaaaaaaaaaaaaaaaaaaaaaaaaaaaaaaaaaaaaaaaaaaaaaaaaaaaaaaaaaaaaaaaaaaaaaaaaaaaaaaaaaaaaaaaaaagcacccaccttttgtgtaacagggcggcccaaaaagggagacgaaaaaaaaaagaagaggagggggcgggcgaaacacacaggcgagtggggacaggggtgcgggggactgtggaagaccctcgcgggggggcgccaggggccacacccaagaaataacgcccgcgcataaactgcggcgacgggggaccaggctatttccgg

SEQ ID NO: 7510 - DNA, 5608 bp, Homo sapiens
  misc_feature (122)..(174): n is a, c, g, or t
  misc_feature (3309)..(3325): n is a, c, g, or t
gacaatgctggggagatgaagatagtgtgtggctgcttctggactcaaggaggaggagagagattccgcgagccgacaccatgcgatccaaggcgagggcgaggaagctagccaaaagtgannnnnnnnnnnnnnnnnnnnnnnnnnnnnnnnnnnnnnnnnnnnnnnnnnnnnacagcgcggaggacgaggccgaggacagtgccatgtcgcccatccccgtggggccaccgtcccccttccccaccagcgaggacttcacccccaaggagggctcgccgtacgaggcccctgtctacattcctgaagacattccgatcccagcagacttcgagctccgagagtcctccatcccaggggctggcctgggggtctgggccaagaggaagatggaagccggggagaggctgggcccctgcgtggtggtgccccgggcggcggcaaaggagacagacttcggatgggagcaaatactgacggacgtggaagtgtcgccccaggaaggctgcatcacaaagatctccgaagacctgggcagtgagaagttctgcgtggatgcaaatcaggcgggggctggcagctggctcaagtacatccgtgtggcgtgctcctgcgatgaccagaacctcaccatgtgtcagatcagtgagcagatttactataaagtcattaaggacattgagccaggtgaggagctgctggtgcacgtgaaggaaggcgtctaccccctgggcacagtgccgcccggcctggacgaggagcccacgttccgctgtgacgagtgtgacgaactcttccagtccaagctggacctgcggcgccataagaagtacacgtgtggctcagtgggggctgcgctctacgagggcctggctgaggagctcaagcccgagggccttggcggtggcagcggccaagcccacgagtgcaaggactgcgagcggatgttccccaacaagtacagcctggagcagcacatggtcatccacacggaggagcgcgagtacaaatgcgaccagtgtcccaaggccttcaactggaagtccaacctcatccgccaccagatgtcccacgacagcggcaaacgcttcgaatgtgaaaactgcgtgaaggtgttcacggaccccagcaaccttcagcggcacatccgctcgcagcacgtgggcgctcgggcccacgcctgccccgactgcgggaagaccttcgccacgtcctccggcctcaagcagcacaagcatatccacagcacggtgaagcctttcatatgtgaggtctgccacaagtcctacacgcagttctccaacctgtgccggcacaagcggatgcacgccgactgccgcacgcagatcaagtgcaaggactgtggccagatgttcagcactacctcctccctcaacaagcaccggcgcttctgcgagggcaagaaccattacacgccgggcggcatctttgccccgggcctgcccttgacccccagccccatgatggacaaggcaaaaccctcccccagcctcaatcacgccagcctgggcttcaacgagtactttccctccaggccgcacccggggagcctgcccttctccacggcgcctcccacgttccccgcactcacccccggcttcccgggcatcttccctccatccttgtacccccggccgcctctgctacctcccacaccgctgctcaagagccccctgaaccacacccaggacgccaagctccccagtcccctggggaacccagccctgcccctggtctccgccgtcagcaacagcagccagggcacgacggcagctgcggggcccgaggagaagttcgagagccgcctggaggactcctgtgtggagaagctgaagaccaggagcagcgacatgtcggacggcagtgactttgaggacgtcaacaccaccacggggaccgacctggacacgaccacggggacgggctcggacctggacagcgacgtggacagcgaccctgacaaggacaagggcaagggcaagtccgccgagggccagcccaagtttgggggcggcttggcgcccccgggggccccgaacagcgtggccgaggtgcctgtcttctattcccagcactcattcttcccgccacccgacgagcagctgctgactgcaacgggcgccgccggggactccatcaaggccatcgcatccattgccgagaagtactttggccccggcttcatggggatgcaggagaagaagctgggctcgctcccctaccactcggcgttccccttccagttcctgcccaacttcccccactccctttaccccttcacggaccgagccctcgcccacaacttgctggtcaaggccgagccaaagtcaccccgggacgccctcaaggtgggcggccccagtgccgagtgcccctttgatctcaccaccaagcccaaagacgtgaagcccatcctgcccatgcccaagggcccctcggcccccgcatccggcgaggagcagccgctggacctgagcatcggcagccgggcccgtgccagccaaaacggcggcgggcgggagccccgcaagaaccacgtctatggggaacgcaagctgggcgccggcgaggggctgccccaggtgtgcccggcgcggatgccccagcagcccccgctccactacgccaagccctcgcccttcttcatggaccccatctacagcagggtagaaaagcggaaggtcacagaccccgtgggagccctgaaggagaagtacctgcggccgtccccgctgctcttccacccccagatgtcagccatagagaccatgacagagaagctggagagctttgcagccatgaaggcggactcgggcagctccctgcagcccctcccccaccaccccttcaacttccggtccccacccccaacgctctccgaccccatcctcaggaagggcaaggagcgatacacgtgcaggtactgtgggaagatcttccccagatcagccaatctcaccagacacctgaggacgcacactggggagcagccgtacaggtgtaagtactgcgaccgctccttcagcatctcttcgaacctccagcggcacgtccggaacatccacaacaaggagaagcctttcaagtgccacctgtgcaaccgctgcttcgggcagcagaccaagctggaccggcacctcaagaagcacgagcacgagaacgcaccagtgagccagcaccccggggtcctcacgaaccacctggggaccagcgcgtcctctcccacctcagagtcggacaaccacgcacttttagacgagaaagaagactcttatttctcggaaatcnnnnnnnnnnnnnnnnntagtgagatgaaccaagcatcaacgcgaacagagaaacgggcggacatgcagatcgtggacggcagtgcccagtgtccaggcctagccagtgagaagcaggaggacgtggaggaggaggacgacgatgacctggaggaggacgatgaggacagcctggccgggaagtcgcaggatgacaccgtgtcccccgcacccgagccccaggccgcctacgaggatgaggaggatgaggagccagccgcctccctggccgtgggctttgaccacacccgaaggtgtgctgaggaccacgaaggcggtctgttagctttggagccgatgccgacttttgggaaggggctggacctccgcagagcagctgaggaagcatttgaagttaaagatgtgcttaattccaccttagattctgaggctttaaaacatacactgtgcaggcaggctaagaaccagggttctctggacgcttggttgaaggtcactggagccacgtcggagtctggagcatttcaccccatcaaccacctctgacgggctgggcagccgggggccggtggccagagcgagggcaccagccacgaaggacggaggcgggcggggccccggagaaccctgtccctgcgtgtggccactcctcagcatcctccccacccaccatggttcattccgacttttccaatggaaactcagatcccaaaagtccctaaagcagtcgtagagtctcaccatctccaaggattggtcttgagaacactgttcagtgacggccatgcaggtggccgtccaaagacagccaacggagctgcctcgcagaatcagccagtgggcaggtggacgctctgctgagacagaagctggtggccactgccgggtgcccgcgtggggtcgcggaagggaatggatagactggtgtgctcaaaagagagagatcactcaaatgatttttataatgaaatgacaagaataacccttttggtaaccgtattgactgcagagtctatttaagcatgtggttttaaaaatagacagtattttttaaaaatcaaaaaatgacttgcaaattgttttttaaaagtaattttgcattgctttgaaatttgagctcatttgcaaacccgagtctgcctgggaacccgcactgtgcctgggtgtattctttatactgtagataatggagaaattttctatctctgtccctatttgtataagccaaggtgatgctgggtgccccgaggcagaacaagaggcgcggggccacacccgtgaaccatgcagacggccgaagaagtcttaggcagggcgccctgggctgcaggcctgcccgaggctgggatgggaagtgtgcctgccctcgtgtgacatggaattggtgtcaggaccgccacgtggccttcagaggaatccacaggtccccacccaagatccctcaattatatggggaagtcgagggcctgtggcttggatccgccatgcagagatgtggccgggcacccatcttccttccctcctctgtccctgcctcggccaccccacgcgggaacccagcgccgtcctctgaaggcagggccttggccacgtcctgggtctcccacctcccacctgaccccagcggctccggtgtcctccacgtggctgccctggggagcaatcccagcggatcgctccgggccaccaagccgcacctgtgcctgagactccggatggacgacacagtcgtcacgtcgctcttcctgcgggttcttggcgagacacagcttgagaacagaagggcgtcgggggaacctgccgcaaggagcagagacagcacagccccccgggcccagccgcctccctctcttgggacgcaacttcttccccactcggatgggctttaaattattcccataggggccaatttcaaataataatttttttccctgatggaatttaccttaatctgtatataacttgtaattttttctaattcatttcttttcttattttatttcctccttaacagtatttttggcattagacattcttattgtgaagaaataatgttaatataagtatctggtgaaggaccaaaaccgtgtgataaggttgtgtgtcgtgtgggagtggggcgattttttatgtgccaaatacccccgtcccccccaggaatcctgctgtccctgctgccgtttaccagacaatcatatgtttttgttaaatttgcgtttcagttacatttgcatttaagacaagtgttctatttatttcttgtattgtttggaagaaaaaatgatgatagagtcccaaaa

SEQ ID NO: 7511 - DNA, 4439 bp, Homo sapiens
agcggaggctgggctggagtggtggaaggggggtggcaggtctgcattgccgcttccctggtgccgggagcagtcgccgctgccgcctccgcccgcggccgggacccccgtcctcgcccgggactccttacccggggaacctagaccaggtctccagaggcttgtggaagagaagcaggcgacccttcctgagttatcctggcttagcctcccaatctggctccccttccccttcccattcccctgctccccctgtcccttccccatccacccaactgaactgggtataggtcaaagctcctctccttccttttccttcctaggcactcattggctaggacctgtttgctcttttttttgtgcccagagatactggaacacgcttcatctaagtaactgtggggaggggtctttttgactctacaagtccttgagcaaaaagctgaaaaagaagcaggaggtggagaagacccagtgaagtgccccaagccccatcatggaagagggcttccgagaccgggcagctttcatccgtggggccaaagacattgctaaggaagtcaaaaagcatgcggccaagaaggtggtgaagggcctggacagagtccaggacgaatattcccgaagatcgtactcccgctttgaggaggaggatgatgatgatgacttccctgctcccagtgatggttattaccgaggagaagggacccaggatgaggaggaaggtggtgcatccagtgatgctactgagggccatgacgaggatgatgagatctatgaaggggaatatcagggcattccccgggcagagtctgggggcaaaggcgagcggatggcagatggggcgcccctggctggagtaagggggggcttgagtgatggggagggtccccctgggggccggggggaggcacaacgacggaaagaacgagaagaactggcccaacagtatgaagccatcctacgggagtgtggccacggccgcttccagtggacactgtattttgtgcttggtctggcgctgatggctgacggtgtggaggtctttgtggtgggcttcgtgctgcccagcgctgagaaagacatgtgcctgtccgactccaacaaaggcatgctaggcctcatcgtctacctgggcatgatggtgggagccttcctctggggaggtctggctgaccggctgggtcggaggcagtgtctgctcatctcgctctcagtcaacagcgtcttcgccttcttctcatcttttgtccagggttacggcactttcctcttctgccgcctactttctggggttgggattggagggtccatccccattgtcttctcctatttctccgagtttctggcccaggagaaacgaggggagcatttgagctggctctgcatgttttggatgattggtggcgtgtacgcagctgctatggcctgggccatcatcccccactatgggtggagttttcagatgggttctgcctaccagttccacagctggagggtcttcgtcctcgtctgcgcctttccttctgtgtttgccattggggctctgaccacgcagcctgagagcccccgtttcttcctagagaatggaaagcatgatgaggcctggatggtgctgaagcaggtccatgataccaacatgcgagccaaaggacatcctgagcgagtgttctcagtaacccacattaagacgattcatcaggaggatgaattgattgagatccagtcggacacagggacctggtaccagcgctggggggtccgggccttgagcctaggggggcaggtttgggggaattttctctcctgttttggtcccgaatatcggcgcatcactctgatgatgatgggtgtgtggttcaccatgtcattcagctactatggcctgaccgtctggtttcctgacatgatccgccatctccaggcagtggactacgcatcccgcaccaaagtgttccccggggagcgcgtagagcatgtaacttttaacttcacgttggagaatcagatccaccgaggcgggcagtacttcaatgacaagttcattgggctgcggctcaagtcagtgtcctttgaggattccctgtttgaagagtgttattttgaggatgtcacatccagcaacacgtttttccgcaactgcacattcatcaacactgtgttctataacactgacctgttcgagtacaagtttgtgaacagccgtctgataaacagtacattcctgcacaacaaggagggctgcccgctagacgtgacagggacgggcgaaggtgcctacatggtatactttgtgagcttcctggggacactggcagtgcttcctgggaatatcgtgtctgccctgctcatggacaagatcggcaggctcagaatgcttgctggctccagcgtgatgtcctgtgtctcctgcttcttcctgtcttttgggaacagtgagtcggccatgatcgctctgctctgcctttttggcggggtcagcattgcatcctggaatgcgctggacgtgttgactgttgaactctacccctcagacaagaggaccacagcttttggcttcctgaatgccctgtgtaagctggcagctgtgctggggatcagcatcttcacatccttcgtgggaattaccaaggctgcacccatcctctttgcctcagctgcccttgcccttggcagctctctggccctgaagctgcctgagacccgggggcaggtgctgcagtgaaggggtctctagggctttgggattggcaggcacactgtgagaccaacaactccttccttcccctccctgccctgccatcctgacctccagagccctcactccccactccccgtgtttggtgtcttagctgtgtgtgcgtgtgcgtgtgcatgtgtgtaaaccccgtgggcagggactacagggaaggctccttcatcccagttttgagatgaagctgtactccccatttcccactgcccttgactttgcacaagagaaggctgagccccatccttctccccctgttagagaggggcccttgcttccctgttccaggggttccagaataggcttcctgccttccccatcattccctctgcctaggccctggtgaaaccacaggtatgcaattatgctaggggctggggctctggtgtagaccatggaccaaaagaacttcttagagtctgaagagtgggcctcgggtgccctctcacatctcctgttggatgctgggggagaagcaataaacctcagccctctggcctccactttcctctcaatttgggctgcaaatatgaagcctgaattttatgaaattagctttctgattcttatttattaatagattaagttctgaggcagctccgcaggactgtgtgtgaatgtgtatgtatacttacatatgtgtgtgcatgtgccatggggcggggggtatcactatactgtcctcaaatataagccaagggtaatttcagcggatgcacacacaaccctgcctcccacagttcctcccctaatctggtttctgtgttgagcctgggatggaggagccctaggccagcctgggataagagtcccacagtctagggagatctgagggcatccgacaaggcccatctccttccctcctcaagaagcagaggcctcctctggagtgagaggctccacccactacagcacaggcgggaatagcacagctgccctcccatgctccctacctgtcccctcacagggaggggagcaggggagggaaagaaaccaggcatctggtcaaaccagcagatcaaaaagcacaaagagctggggcagaggcaggaagcaggggccctcctggcagctcctctgagtggggagaggttgggcagtgagtgagggacccctaatgcagggactagaagcctcagtttccccattttacccttccacacaatagcctctgtaggttaggctgccccatcccaccctactctgtgtggctgctttctttggtgccctcccctcaccccactgtagctgtgacgtgttgtagtttttagatgtttgtaaaatgtttaaaaaaatgttaaaaggaaaaaagtgaaaataacaaaaaagaaaatcaaaattcaccttcgtcatgctgcgtccagtgccccaaccctgtggtcactctccccattttgtaacactgtaccaggtggtgactgtttaactctttggtgtctgtgctcaaaagactgccttctccagtgcccagtgtatgagtgtgtgccctgtgcccttgtccctcactccccacatgctggacgtagccctcttcctcgcacccctgggagggacccatccatctcccttgctctcctggggaaccctaaacccaactctgttgatgtgaaaaatgcagtgaaaaatattgacgaaaaataaaacggaaacaaatcctcaaaatacaaaaaaaaaaaaaaaaaaaaag

SEQ ID NO: 7512 - DNA, 6961 bp, Homo sapiens
  misc_feature (6906)..(6906): n is a, c, g, or t
  misc_feature (6934)..(6934): n is a, c, g, or t
agcgggggagaggcagttggagaagaggtaagcggttactcactccatggctgcagcaaggagaggcggcggcggcctcggctgaagaaagaaggtgggagcggagagcgcaggcgtgaaacccaccttgtcccatccacatcaggacatcccagctggagttcaaccttcatcccttctgtggcagttaggagactgaatcaaggtccagagaaggtggaggaatcctgatactgagcggaagaaaatacacagatgtgcttccttcccagtcctgacaaatggcctttccttaagttcctcattaattcatatgaagacaacacatttggtgactaaatttggaatcagaggcttttaaagcctcccagctgctctgaccccaatatcaggaacttggcatctctgatctaacaagggcaccactaacaaggacaaagccaccatcattcaccttgacagtggagggcagtggagaggaccgcgctgtcctgctgtcaccaagagctggagacaccatctcccaccgagagtcatggccccattggccctgcacctcctcgtcctcgtccccatcctcctcagcctggtggcctcccaggactggaaggctgaacgcagccaagaccccttcgagaaatgcatgcaggatcctgactatgagcagctgctcaaggtggtgacctgggggctcaatcggaccctgaagccccagagggtgattgtggttggcgctggtgtggccgggctggtggccgccaaggtgctcagcgatgctggacacaaggtcaccatcctggaggcagataacaggatcgggggccgcatcttcacctaccgggaccagaacacgggctggattggggagctgggagccatgcgcatgcccagctctcacaggatcctccacaagctctgccagggcctggggctcaacctgaccaagttcacccagtacgacaagaacacgtggacggaggtgcacgaagtgaagctgcgcaactatgtggtggagaaggtgcccgagaagctgggctacgccttgcgtccccaggaaaagggccactcgcccgaagacatctaccagatggctctcaaccaggccctcaaagacctcaaggcactgggctgcagaaaggcgatgaagaagtttgaaaggcacacgctcttggaatatcttctcggggaggggaacctgagccggccggccgtgcagcttctgggagacgtgatgtccgaggatggcttcttctatctcagcttcgccgaggccctccgggcccacagctgcctcagcgacagactccagtacagccgcatcgtgggtggctgggacctgctgccgcgcgcgctgctgagctcgctgtccgggcttgtgctgttgaacgcgcccgtggtggcgatgacccagggaccgcacgatgtgcacgtgcagatcgagacctctcccccggcgcggaatctgaaggtgctgaaggccgacgtggtgctgctgacggcgagcggaccggcggtgaagcgcatcaccttctcgccgccgctgccccgccacatgcaggaggcgctgcggaggctgcactacgtgccggccaccaaggtgttcctaagcttccgcaggcccttctggcgcgaggagcacattgaaggcggccactcaaacaccgatcgcccgtcgcgcatgattttctacccgccgccgcgcgagggcgcgctgctgctggcctcgtacacgtggtcggacgcggcggcagcgttcgccggcttgagccgggaagaggcgttgcgcttggcgctcgacgacgtggcggcattgcacgggcctgtcgtgcgccagctctgggacggcaccggcgtcgtcaagcgttgggcggaggaccagcacagccagggtggctttgtggtacagccgccggcgctctggcaaaccgaaaaggatgactggacggtcccttatggccgcatctactttgccggcgagcacaccgcctacccgcacggctgggtggagacggcggtcaagtcggcgctgcgcgccgccatcaagatcaacagccggaaggggcctgcatcggacacggccagccccgaggggcacgcatctgacatggaggggcaggggcatgtgcatggggtggccagcagcccctcgcatgacctggcaaaggaagaaggcagccaccctccagtccaaggccagttatctctccaaaacacgacccacacgaggacctcgcattaaagtattttcggaaaaaaaaaaaaaaaccagcctcccccgtggctcagttacttccccagtttgcctgcatcggaaccactagccctgcagttagcaggcgccacgcccatcctggagcccccccaaaaatctgcccctcacttcttcctggacagtggggctccagaggagggtggggggtggtgcgcacagagggaaccggaaggacgccctgcaccaccgggaaatggcaatcacagcgaccacctctgtcacgaggctgaagtccagatgggccctaatgcaagtaacagaaagcccagctgacagtggctgaacaggaggtgatttttctcacaagcagcagctgggagggcaggctccccagagtgcatctctgcaggcccttccaccttggttatgtccgggaagtgttcccacacagctaccaggtcgccgccacagcccagagcaccctatcctcttccaaaaaccccaaatcaggccgggcgcggtggctcacgcctgtaataccagcactttgggaggccaaggcaggcagatcacctgaggtcgggagttcaagaccagcctgggcaacatggtggaaccccatctctaccaaaattacaaaaatcagccgggtgtggtggcacacgcctgtagtcccagctactcaggaggctgaggcagggtaattgcttgaacccgggaggcggaggctgcagttagccgagatctgccactgcactccagcctgggcgacagagcaagactccatctcataaaacaaacaaacaaaaaaacaaatcaggcaactcaggaagccctgcctccacaaaccccaatcattcaccctaggctctgcccagccaccatcccctcctcaaccaggtcagagcccacttggcagccttccccccaccaacaagaagccaactgcacatgagaagtgtcagtttaatgaagccagcttatcagcagggcggcggagcacacctgccccctcgcaggtgtgcctggctcgggctaaagtgcctgtgcagaacgaggctgcctggcggggttaggagtcggcgccctcgtcctcctcctcgggcaggatctccaggctgctgtcgggctgcggggctgtgtccgtggagggcggcggggtgggcggggcccgggtgggcgacagaggcagcggggaggcggtgggcgaggggctgtggggctctgcgggcggggccagccccaggatctcctgcacgttgtggggcagctcctggaggcacgggatgagagaagcgaaaagcggaaggtgaaggtgagaagggggcgggggtcggtcggggttcgggcggggcgctgcggggcggacggggactcacggggcaggcggttagctggcggtgcagggcctcggcgcgggtcagcacgtcctccacgctcagcttcatagtcagctcgttgatgtgctgcgggagggggtgggtcaggcgccagtcggcactcaaccacctccgcccgagcgcccactctgtgcttcgtgctgggaaacaatgaagacacaccgggctggccctctgggggctcagaagtgcgctgggcgagacatgcttctcaggcctccgggagcattctgagcacgtactcggggagggaaggtccccacccacctgcccggaggaccttgctgggagcaggcatggcatggggcagaagggaaacctacgcggccccacccccactgcgctcccaactaaccaggctttcaataatcccacactaaacacctgctccccggaggtactgcggccctgggcagcgcccagctcaggggggacagggcgggggcggggccggagcctcaccttgaggatctcattggagccgaagccggacagcatgagggtgtccctctccatgtccaggatggcgcaggccaccagcaggtgcagattggggccagggagccctgtccacagcacctgagggtgcgggacagagggagggagggaggtcatagcccagcctgggcctgaggtcccaccagggtctgtccctctccgcccaacctcccagggcaggtgagcccaccccttcaggcctctcgcccaaactggctggcccacctcccacagccgaaggacatccgggaaggggaattccctcttgaaccagatgagcagccaccggaaacagaagcagagagagccggagtcctgggaatctgggggatgacatggagcccactcagccttgcccagcgctgggactgagagtttgagaagtcatcctgactggaagaccttccccaagtctagaggaagtgtgctattatacttccacatctgccatggacatggaagggaggcaggacgcccagcacgcccgacgaaacagacctctgcccgctgctggtggacacaatgccgcgcagtcaagaaaagtgatgtttcagaagactttgaatgacccagaggcagcctctgtccttgtgccctaggaggttgtgtggggatgtttctcttgtttggatcaggacccaatgtccaggatgccactgtggctgctaccagagaatctggcaaggtctatggccccattgtctcctgcccaccctcccgagagacatacccaggaagtcgcagagcagggggtccagcaccctcaggagcagcagcagtcgcccgagttgccgcttcatggtctcctggctctcttcaaagttcccttgctgtgggacggaaggaggggggaaagagcagaccccgtgaggtaccaggacacctgatcgctcgataggcctgtgtcccacccctgacccaagcctcaccacgagctccatgaagccacagaaacaccaaactcctacagctgccgcctgcatcccagaccgcctgcatcccgctcggagcgggtccgagccctgctccctcccagcgcaccttttccacgacacggatgacaccagcgatgagagagtctcggtcctgatacttcttagcgctggtgtgcaggccgtgccggattctcgagagccaaggcctgagagaagagctgatcactagacggggcgtttcgcatacactgaagcgagggaatgcgtcctcagtgcttaccctgtagccggctccttccatagtcgccgccgaaggccccactgccccgcctcctccttttcctagtcagcgtgttgtcacttccggagaaaacagttcccctccgggccggacagtggtagcggcccgacccgttctagagaaggagcgggtgaaaccatttttcagaagggggttattccactggaacctcgagggtggatcggagtcacgtggcgcagacgctgaaggtggatccggctacggagagtgcgcaggcgcagtgttcgccctctcgccacgaagtaaacaagtgggagggtctgagagctgcaccacctggggcaagcacgccttgaaacgcccacttccttctccatattgtatactggaattgaagccaaggaggtaccattttgctcgagggcatggcctaagccggtcagctaaggccatgttaatacggggctgtcccatctctctgcggggcgcgacagctggaagagccgaacggataagagaagaggaggtgagaggagctgtacaccacaagaggcactgagggactcaggataacgggatgaagccgtcagtgcccccagaaacgaagcggccccggacgaatttctgagtcaccgtcgcgagaaagcgggctgagccgccattttgaagcctggcaaaccgaagcaagaaatgctgccgtgttggatctttgccagccttcgtgccgaatgggagcaggttggagggagggagagccaatatacactatgggctgattaagcccggttggctgccatgttgttaacgagcaccgatttcctctacttttgtcgaagaagtttattgtgggtcagggacgtcaggtcgcttgccttcgtttactgtggtcatgattgagcatatgaggacggccattattgttgggggcaaatggaaatgctctaggcggggccatttttcttaggggcaagctgtcgtcacccttgtccactggttcggatgaagcccctgttggccgccatcttgatctcgggcggcccccgataaaggaaggcggagtgtgccggaaaagaaggtcggggcaacttggcccggacgggacggcatggcgcccgcctttgctcctttctgacagaccggcggaatggcgccccggcccagaacaatgtcgggcttcccgggcctcggtagccggaatggcctctacggcgacgaacccacaggagacttgtcgtggctttatctgcaccggctgcttttgtgcgcctgttatgtaccggcttctcgtcgcgccggacactcctggtaactggtgccctcctcgatttgcctctgtgtccggcctggctatgcctgccgcccgcgtcggtcctggctagccgagacattacgtcgcgccggcgtattaatgcgatcgattctactcgccttcacgttgacgcgaatgccttcgtctcaccgactactcacgagccgagctggatagtatgcgtccctaactgtgacgtcccgcagggcgtcgcgccagatgcgcctggttcgcctctgctcgctcttcgctctacactctcgctctgtctctatccagaactgcgccgntactactcccgctcctcttaacataagntcgagacgagtctgtttttttgcaaat

SEQ ID NO: 7513 - DNA, 3640 bp, Homo sapiens
ggtctggggctgaggggaggcccggggcctttctggggcctgggggatcctcttgcactggtgggtggagagaagcgcctgcagccaaccagggtcaggctgtgctcacagtttcctctggcggcatgtaaaggctccacaaaggagttgggagttcaaatgaggctgctgcggacggcctgaggatggaccccaagccctggacctgccgagcgtggcactgaggcagcggctgacgctactgtgagggaaagaaggttgtgagcagccccgcaggacccctggccagccctggccccagcctctgccggagccctctgtggaggcagagccagtggagcccagtgaggcagggctgcttggcagccaccggcctgcaactcaggaacccctccagaggccatggacaggctgccccgctgacggccagggtgaagcatgtgaggagccgccccggagccaagcaggagggaagaggctttcatagattctattcacaaagaataaccaccattttgcaaggaccatgaggccactgtgcgtgacatgctggtggctcggactgctggctgccatgggagctgttgcaggccaggaggacggttttgagggcactgaggagggctcgccaagagagttcatttacctaaacaggtacaagcgggcgggcgagtcccaggacaagtgcacctacaccttcattgtgccccagcagcgggtcacgggtgccatctgcgtcaactccaaggagcctgaggtgcttctggagaaccgagtgcataagcaggagctagagctgctcaacaatgagctgctcaagcagaagcggcagatcgagacgctgcagcagctggtggaggtggacggcggcattgtgagcgaggtgaagctgctgcgcaaggagagccgcaacatgaactcgcgggtcacgcagctctacatgcagctcctgcacgagatcatccgcaagcgggacaacgcgttggagctctcccagctggagaacaggatcctgaaccagacagccgacatgctgcagctggccagcaagtacaaggacctggagcacaagtaccagcacctggccacactggcccacaaccaatcagagatcatcgcgcagcttgaggagcactgccagagggtgccctcggccaggcccgtcccccagccaccccccgctgccccgccccgggtctaccaaccacccacctacaaccgcatcatcaaccagatctctaccaacgagatccagagtgaccagaacctgaaggtgctgccaccccctctgcccactatgcccactctcaccagcctcccatcttccaccgacaagccgtcgggcccatggagagactgcctgcaggccctggaggatggccacgacaccagctccatctacctggtgaagccggagaacaccaaccgcctcatgcaggtgtggtgcgaccagagacacgaccccgggggctggaccgtcatccagagacgcctggatggctctgttaacttcttcaggaactgggagacgtacaagcaagggtttgggaacattgatggcgaatactggctgggcctggagaacatttactggctgacgaaccaaggcaactacaaactcctggtgaccatggaggactggtccggccgcaaagtctttgcagaatacgccagtttccgcctggaacctgagagcgagtattataagctgcggctggggcgctaccatggcaatgcgggtgactcctttacatggcacaacggcaagcagttcaccaccctggacagagatcatgatgtctacacaggaaactgtgcccactaccagaagggaggctggtggtataacgcctgtgcccactccaacctcaacggggtctggtaccgcgggggccattaccggagccgctaccaggacggagtctactgggctgagttccgaggaggctcttactcactcaagaaagtggtgatgatgatccgaccgaaccccaacaccttccactaagccagctccccctcctgacctctcgtggccattgccaggagcccaccctggtcacgctggccacagcacaaagaacaactcctcaccagttcatcctgaggctgggaggaccgggatgctggattctgttttccgaagtcactgcagcggatgatggaactgaatcgatacggtgttttctgtccctcctactttccttcacaccagacagcccctcatgtctccaggacaggacaggactacagacaactctttctttaaataaattaagtctctacaataaaaacacaactgcaaagtaccttcataatatacatgtgtatgagcctcccttgtgcacgtatgtgtataccacatatatatgcatttagatatacatcacatgtgatatatctagatccatatataggtttgccttagatacctaaatacacatatattcagttctcagatgttgaagctgtcaccagcagctttgctcttaggagaaaagcatttcattagtgttgtattacttgagtctaagggtagatcacagactgtgtggtctcaactgaaaggatcacccttggcatctgtgtgcctggattcttccagaatgtctacaatgctaatctctcacatagaggttcccagcttcttaagaaccccttttggcacctaatcaaatttcaaaatccctccccccacatttcatacttttccccattctcaggacttttcaccatccatcacccacttatcccttcatttgacaccattcattaagtgccttctgtgtgtcagtccctggccactcactgcagttcaaggccccctttccgctctgctgtactcctcgcctacctactccttgccttttctgtcgcacagccccttctttccaggcgagattcctcagcttctgagtaggaaacactccgggctccaggtttctggttgggaagggaaggccaggccaaaagctccaccggccgtatagataatgtactcgcagttttgtatcttccattcatactttaacctacaggtcatttgagtcttcacacaaataataacctatctggccaggagaattatctcagaacagaagtcatcagatcatcagagcccccagatggctacagaccagagattccacgctctcaggctgactagagtccgcatctcatctccaaactacacttccctggagaacaagtgccacaaaaatgaaaacaggccacttctcaggagttgaataatcaggggtcaccggaccccttggttgatgcactgcagcatggtggctttctgagtcctgttggccaccaagtgtcagcctcagcactcccgggactattgccaagaaggggcaagggatgagtcaagaaggtgagacccttcccggtgggcacgtgggccaggctgtgtgagatgttggatgtttggtactgtccatgtctgggtgtgtgcctattacctcagcatttctcacaaagtgtaccatgtagcatgttttgtgtatataaaagggagggtttttttaaaaatatattcccagattatccttgtaatgacacgaatctgcaataaaagccatcagtgctatttggatgtatctacaaaaaaaaaaaaaaaaaaaaagccgct

SEQ ID NO: 7514 - DNA, 1473 bp, Homo sapiens
ggcccccgggtgtcgaatcggccgagggactctgagggcgatagcagttggctcaggatgcactggaagggctcagagggctcctccatagtctgcaagggctccctgcagctgttcctgttcttccctgggagctgactgtcaccaagcacatactagcaagcaggtgcctacagacggggagggcaggagacgctgcagagcattacttggacctgctggccctgttgctgatagctcgagccaaggtctccccacccccctcccctccagggccctgtatgcctgaggtgtttttggaggcagcggtagcactgatccaggcaggcagagcccaagatgccttgactctatgtgaggagttgctcagccgcacatcatctctgctacccaagatgtcccggctgtgggaagatgccagaaaaggaaccaaggaactgccatactgcccactctgggtctctgccacccacctgcttcagggccaggcctgggttcaactgggtgcccaaaaagtggcaattagtgaatttagcaggtgcctcgagctgctcttccgggccacacctgaggaaaaagaacaaggggcagctttcaactgtgagcagggatgtaagtcagatgcggcactgcagcagcttcgggcagccgccctaattagtcgtggactggaatgggtagccagcggccaggataccaaagccttacaggacttcctcctcagtgtgcagatgtgcccaggtaatcgagacacttactttcacctgcttcagactctgaagaggctagatcggagggatgaggccactgcactctggtggaggctggaggcccaaactaaggggtcacatgaagatgctctgtggtctctccccctgtacctagaaagctatttgagctggatccgtccctctgatcgtgacgccttccttgaagaatttcggacatctctgccaaagtcttgtgacctgtagctgccacgttttgaagagcttgagctgggtccccagtgggctgtctctctgtggggagggctttctgcttcaccatcattaggaatgtgaccattcctatataattcctggactggtgagattggtggtaggcctgtgaaatttgccctagttactaccattctcgttttggaggaaacaatctctgccaccaccaagtcattgactttgctcgaggcaccttttttcctgtttctccttttctgttgtcgagtaaaatttcatatttaaaaaaaaaaaaaaaaaaaaggggtatcttgtagggccgccctcggcactccgcacctgtcccctggggggggcccgctcctacgcattacccggttcacggggggccctccggttttcgcggatcgcccacgcggttcggctccccacaaaacgtgtcaccccccatgacccgcgcggtcactggcctatgcccccctgcaggccttcgcgccgcctggtttgcctcctc

SEQ ID NO: 7515 - DNA, 501 bp, Homo sapiens
tttttttttctaatacggagaaagctttacactatgaaactagttacaaactctttttttccagcagtaaaggtggtgtacaagtcctctaaccttatcttaagaggtaaccaggaagttgaacctggccaactgggaaatgctgagatcaagatataatggagtgaccaactacgaaaggaacaagactcaagaactaaggactgggcagaaaatcactccagcatactggataagttcaacaacaacaacaacaaaaacagattaaatcctcatggcctcagtgcagtgtagaatgaaggtattctgatgcaggaacagaatttggtaatagagaagcctggatcaggtggtactgaggaatatagactagcacacacttgtgagtatccaaggatatgtcagctagaagccaactctgattcctaagtgggggtgaagaggggataactgaaagaaaacaatggatgagtagaaatggccactgaagagaatatgcag

SEQ ID NO: 7516 - DNA, 491 bp, Homo sapiens
tttaagaataaagtgaagaaacaattatgatcatggggagaaagaatgtgagagcagaaaggctcaagtttatacatgcatcgaaataagagggaagaaaacaaaaggacaatgcaccatggaaagaaggaaagcaaaataatggaaagggagaaaaaaggagcatctcttcctaggaaagtaatctacaatgctgtgttaatctgccaacgctttggtgggactggcaatcagaaattgtctttcctcactgacaaacatgaccagactctggcccctgatttgtaatttttttcccaaatgtaaaatgaggccaaaataacctaaaactacttttaacttgtttattttggattaaaataattatatataattattgttggagggaaatcttacaatacacaatcttgggtgtttttatttaaatctatcacacattgagttacaaaattaaaatgtcagtctttcaactggagaaagtactcaaatca

SEQ ID NO: 7517 - DNA, 2410 bp, Homo sapiens
atggcggtggccaggaagatccgaactttgctgacggtgaacatcctggtgttcgtgggcatcgtcctgttctccgtgtactgccgcctgcagggccgctcccaggagctcgtgcgcatcgtgagcggcgaccgccgggtgcgcagccgacacgccaaggtgggcacgctgggggaccgtgaggccatcctgcagcgcctggaccacctggaggaggtggtctacaaccagctcaacggccttgccaagcccatcggcctggtggaggggccaggaggtctgggccagggtggcttggcggccaccctgcgtgatgacggccaggaggcggaaggcaagtatgaggagtacggctacaacgctcagctcagcgaccgcatctccctcgatcggagcatccccgactaccggcccagaaagtgcagacagatgagctacgcccaggacctgccccaggtctccgtggtcttcatcttcgtcaatgaggcgctgtcggtcatcctgcgctccgtgcacagcgtggtcaaccacacgccctcccagctcctcaaggaggtcatcctggtggacgacaacagtgacaacgtggaactcaagttcaatctggaccagtacgtcaacaagcggtacccaggcctcgtgaagattgtccgcaacagccggcgggaaggactgatccgcgcgcggctgcagggctggaaggcggccaccgccccagtcgtcggcttctttgatgcccacgtcgagttcaacacgggttgggccgagcccgcactgtcgcggatccgagaggaccggcgtcgcatcgtgctgccagccatcgacaacatcaagtacagcacgtttgaggtgcagcagtatgcgaacgccgcccatggctacaactggggcctccggtgcatgtacatcatccccccgcaggactggctggaccgcggcgacgagtcagcacccatcaggaccccagccatgatcggctgctccttcgtagtggaccgcgagtacttcggagacattgggctgctggaccccggcatggaggtgtatggcggcgagaacgtagaactgggcatgagggtgtggcagtgtggcggcagcatggaggtgctgccctgctcccgcgtggcccacatcgagcgcaccaggaagccctacaacaacgacattgactactacgccaagcgcaacgccctgcgcgccgccgaggtgtggatggatgacttcaagtcccacgtgtacatggcctggaacatccccatgtcgaacccaggggtggacttcggggacgtgtctgagaggctggccctgcgtcagaggctgaagtgtcgcagcttcaagtggtacctggagaacgtgtacccggagatgagggtctacaacaacaccctcacgtacggagaggtgagaaacagcaaagccagtgcctactgtctggaccagggagcggaggacggcgaccgggcgatcctctacccctgccacgggatgtcctcccagctggtgcggtacagcgctgacggcctgctgcagctggggcctctgggctccacagccttcttgcctgactccaagtgtctggtggatgacggcacgggccgcatgcccaccctgaagaggtgtgaggatgtggcgcggccaacacagcggctgtgggacttcacccagagtggccccattgtgagccgggccacgggccgctgcctggaggtggagatgtccaaagatgccaactttgggctccggctggtggtacagaggtgctcggggcagaagtggatgatcagaaactggatcaaacacgcacggcactgaccccacctccgcccggacccccacagacctcgggaaggcgctgggccgagccagtgtggctgagtgaccggggtgtgcccggcagacacagcaggacagggctctatgtgcggccaggacagcagaggctgaggggccggggtgtggctgagtgaccagggtgtcacccactgcatctggagtacagcttctcctaggacaggcggctctacccgagggagggcgtctggggacagtgatgccaactcaaacacgtgccttctccacggtatctcctggccaggctgctgggacagccgccgcctctgcatgtaccacagccccccacgccccatagggaggccaagccccggaccatgcaccaggctgcaccctggtgtcttccacccgcaggcctcccatgctccaagcagcctcccccagcacttgcggccgctcagccctccaaccaagacctaagtcacacatcataatgcagctccttgtggtctggtaagaggggtgctggaggacatggacagtgacaaacctgaggccgtgtctaggaggctggcacgactgcttcagcagagaccaaataaagagaggattaggcagc

SEQ ID NO: 7518 - DNA, 566 bp, Homo sapiens
tttttttttttttttctggtgcaatcaagaactttaattggaggcagctcttcccatggtggctttttaggagctggagtgactcttgcttggtggcacaaggatggctcagatgtcttctcctccttcaggggagtttccgaattagtcttcatgactcctgtccaccgccctcttcctcatggagatgccccagcagctgtgcagccgccggctagaatgctcagggcctcccagtgaggcatggctggaatggccagcgctcctggcagtagcggtttaagtttctcttgtaaaaatttctttgggaagcatatgcattcagatcctcaaactcactgctgctggaggaagtgctcttttttgtctggatcaggggtgttctcgaaggcaaatgggagactgcgttaatgcgcttgggattttgtctgtcaagctcatccttctgaagctgcaaattttgggtcgatggcttgtgctcttgggtttgactgggaaccttggagtcattgatggcatagggctcctgacagtccccatggaaaggagttgaaacttctactctg

SEQ ID NO: 7519 - DNA, 2936 bp, Homo sapiens; identical to SEQ ID NO: 7352

SEQ ID NO: 7520 - DNA, 2852 bp, Homo sapiens
aggataaaatgactgcctgccagattccagagatcctcacatatccagagtacccaaactctgtggtagaagataagcagaagaaatgaaaggcatagtccctgactatattctaatttaggactgaatgtacccagatgcttgtggaataatatctaagcaagtgcaaattcatgtaataccgttttgtctgattgcatattgtgttgaaatagtataaaggagaacagaactgggtggaattaattgggaaaaacttcttacaaaagcatcattaatcaaaatttgaaggagaccagactttggccaagtggaaggatgaccattgtcttggcctgtatctcttgtcctttgtcttgtttgaaaagtattttaaaacttaatggtgtattattttgtgctctgaaagctgaggtctgattacaattagtaaaattctatagaagaatctgctgacgtgaaagggaaaaatctttgtcaaatgataccaaataaatgaacaaaacaggaagtagggcctatgatatcgtgagacatgttttgccccacaagagttgcatcttttataaggtgtctctgccccctcataaagcagcactagctttgacatccacggagagctgcaggaagcatcacacaccagcagcatgtgagcagagggaggcagttggggttgaacttcggaactaggccgggtctcctgacagatcacaagacaccccagaggatcttcagcagtcctacttcccattctctatagagctttgaagcttggaacccttccagggtaaacattttctcttgtgctgctcaggacatctggggcctagctcctgggttcctgtctccaagaagcaatgaccttaaactctgagccatactctgtcctcaccagcggctcccatgtttttctgtgtcaggttattaagtacctagtccttgttttctgtctctctcctaagctacctctctgggtccacagaagacttggtagtatagtgagaatggctatacgtgagtacaaacgtggattttccagggcttgggaactgattcttgagcccagaagagccacgcctgctttgaggtcttttggagtggagatgcagccctgggaaatttggggagtcagcaggccagtgtgaagctattggtcctaggagtatatgagcttgctgtttctttgatggaaaatacatgcttctcttgtatactcagaagtgactaagggcaataactcattaatagccatctatccaacttctttactgagtgatgtattccatggggttacctttttcagattattgagttgctctgtaagcactaaaactttttaatcatttttaagaaactttttagattgtattacaaatttgccttaacagtaattagatgttgaatataattttaacattttattaatgacttgggtcatcagttaataccagtactaaaaccatacgaattattggtttattccagaaaatacagtatttgttctatttttaggtagacaatcatttgggatcagagtacattagcatagtaatgctcagtcagacctgttcaagtagtagagcttggagaatgccatgaaatacttatataattaatttgattgcatgaactaagcaattttactaatgaaaaggttgtatatgtgcaagtcacttttttaaaaaccaagaaaaaactttaatagaggaaatcttattcattaatttatttttctgagtaaaaaaacgaaacccaaatctcattttatttcaactgttaaacattttgatctgttgacccataggatcaggatttgggaaccactttactaggaaagagcagatcagtaccatttgtataaaaccggcctcattatgtaagaaagaaaatgttacgtgttttcttctttagcttggttgtgggcacttctacagcaaggaccatatcatattcatctttgcatccctggcacagtgcatgagacataagtacttaataaatgcagttgaatggataatgattagtgttatttatggattagaaaaagcatgtttctatttaagtaagctgtaaaaagtattattgaatatttactgtaaatatatgttcacataaaaaaataacttggagggtctttgtgtccctggcatattatcatcttcatggaaagaatccactgtggtttctgtagagtgattggaaaaatggattattttgaggattgaagaaagtgttctttctgcgttgtcactttgttcaacagtaaaactttattctcagtgttcctactctgcattgtttacatttttgacagttttttttaatcacctacaatctgtaaagaatgtatatattcttttcagcatctcagtttgaaaagacatgcagttaaacttgaccttttgataatcgctcttacaggtcattgtctgttctaacagcaaattgtaaacatgtgcttcatagatattgtggctctcagtcatcactttgtcctatggtatttattgaatgttcacatactaatggtgcacaggtgtttttttctataaatcttctgactgtcctgtaattcattcttaagctttaacttgaaggtatcgtaattgccggcatttgatgtttagcaataaaagaataaatgtgtaccagcattttatgtttaaaaaaaaaacaacaacaacaaaaaaattttgcgggggccgggccccgaaaaattttaaacacacctgttgggggcggggccaagtgtatgtgaaccggccaggtccagagagacgggccaaacggggggggtcccaaaaagcggggcggggtctggacccacggggtgcggccggcaacaggcggca

SEQ ID NO: 7521 - DNA, 4115 bp, Homo sapiens
  misc_feature (1061)..(1077): n is a, c, g, or t
ctggcctcccgcgatcacagcggacagggggcggagcctaagggggtgggagacgccggccccttggcccagctgaaaacggaattctttgccggctggctccccactctgccagagcgaggcggggcagtgaggactccgcgacgcgtccgcaccctgcggccagagcggctttgagctcggctgcgtccgcgctaggcgctttttcccagaagcaatccaggcgcgcccgctggttcttgagcgccaggaaaagcccggagctaacgaccggccgctcggccactgcacggggccccaagccgcagaaggacgacgggagggtaatgaagctgagcccaggtctcctaggaaggagagagtgcgccggagcagcgtgggaaagaagggaagagtgtcgttaagtttacggccaacggtggattatccgggccgctgcgcgtctgggggctgcggaatgcgcgaggagaacaagggcatgcccagtgggggcggcagcgatgagggtctggccagcgccgcggcgcggggactagtggagaaggtgcgacagctcctggaagccggcgcggatcccaacggagtcaaccgtttcgggaggcgcgcgatccaggtagctggggccccagggcctcgccggcagggggcgcgcgaacgcggggcgcggcctcggcggatcggggctggaacctagatcgccgatgtagatttgtacaggagtctccgttggccggaggtcatgatgatgggcagcgcccgcgtggcggagctgctgctgctccacggcgcggagcccaactgcgcagaccctgccactctcacccgaccggtgcatgatgctgcccgggagggcttcctggacacgctggtggtgctgcaccgggccggggcgcggctggacgtgcgcgatgcctggggtcgtctgcccgtggacttggccgaggagcggggccaccgcgacgttgcagggtacctgcgcacagccacgggggactgacgccaggttccccagccgcccacaacgactttattttcttacccaatttcccacccccacccannnnnnnnnnnnnnnnngctgccaacggggagcggcggaaagcctgtaagcctgcaagcctgtctgagactcacaggaaggaggagccgaccgggaataaccttccatacatttttttctttgtcttatctggccctcgacactcaccatgaagcgaaacacagagaagcggatttccagggatatttaggagtgtgtgacattccaggggtcgtttgcttttcagggttttctgagggaaagtgcatatgaaatccttgactggacctgggtggctacgaatcttccgatggatgaatctcccactccagcgctgagtgggagaaggcagtgattagcacttgggtgacggcagtcgatgcgttcactccaatgtctgctgaggagttatggtgaacccacaacttaggccctagcggcagaaaggaaaacctgaagactgaggacaaagtggaggagggccgaggtgggcttcagtaagtccccggcggcgctttagtttgagcgcatggcaagtcacatgcgtaaacgacactctctggaagccctggagaccctcgcccaactccaccagatagcagaggggtaagagaggatgtgcaagcgacgacagatgctaaaatccctggatcacgacgctgcagagcacctttgcacaggatgctggcctttgctcttactacactgaggagagattcccgcgggttccgcaggcagactacacaggatgaggtggtggagtggagtgagagcaattgtaacggttaactgtaacgttttctttcacacacacacacacacacacacacacacacatgctaggatgcggaaatccccttatgacttgctactttttgattttgtgatattttgtactttttagttgttcagcaactgtcttatttaatggggagattttaagtaacataactagtggctctcagttaaaatgtgaggaagaactacagctcttaaatgtagcaatggcactgttgcaaactcagtgcaaacgcctagattgctttcttcttaacctatttatttctttgttaaatttttctgattgtttcctttatagagtgtctcagggtgcagaggtcagactaagaaatattccaaatgtcttttagaagatagatgcacttatgcagtaaattatcttgggatagttcccaaaagattgctgaaaaagtagattgagtataaaaacttgaaaatatatgatggctcgtgggatgtcctactatcactgaacaaactaaaggtgcactgctttgggatttaatttccagggttgcttgatcattatatcattggaacaactgatacttcactactttaataaagaattaacagagattgaactccaagaggtgggtaatttggtttaaaaatacatgttcatgggtttaccactaactcctgagaaatgttaaaggttcacaggggttcccttctctcaatgtttgtaataattgctcataagcaataccagcaattcataaaaactgcttacttatgccatagaaaattaaacacaaagtgtatacatgtaaaaagattataaatgatcattctaccagatacacatttaaaagagaaaaaaggaacagaaacaagtcatttgagagtggagacttataagaaggagtacatttgagttgaatacacaaatctttacttctctaccaattcctattcccaaaatgaacatattactggggaaagttagttgagaatcagagcatatgttattggggaaaggatatgtttattgacacataatctgtaccaggtatgcattaaaatatatttgttaatttaatatttaaacctgagagataggtattgtttcccagatgaggacaatgaggcaaagaaatatcaagtaacttgccaaaggttacaagatattcattccatggatgcacaaagaagtgcatctagttccacagctgattatggttgtcttgcttttcttcccattgcaccagcttgtcctccaaaatcatgaatgatacacatgaagataactttttttaaaaaaaagcagaaatacacaatgatctcccttgtaagctcctaaggtggcttttctttctctaacttctagtaaatataaacggtttgtttgaaaactattttaaaatgtcaacaatatggagaataacccccccaacacacctataaaaacccaaatttttggaacaaagataatggaacctccattttcaaactgaagcacagggacagaaaatatatttctagttatcacttaagcactcaatcattagaggctacaagaataatatttttaaagttacagtattttacaattattagaaaacattctatataaaagaagtcagttgatactttaaaatctcccatttggtttataaaatcccttaatttgacctctatatcttaaattccaagatgtttaaatttgctagttgcattatactgggtcatgaaaaattatcccttgaaatagatatgaaacatgttacttcatttctggtttaaataacttgtggaatctttcctaatgacaacttgatattaagggaaactaaagaaaatgttattgtggatcccacagtactatattacactgtttttttttgtttgttttgttagttttttttatttaaagcaaacctcaaacattattgggtatcaattaccacctggttgtattaaaatagtaacttatcaatgccatgtaaaaattaattccattttcgaagccacctggcagacaggtttagctgtttcatcagcagcctaatatatactgttaaatttgttaaggatttcactttgaaggatacatgcaaaacatatagttactattttcatgagtcctgcttctagctccattgtggaatacagaaaattaaatatacctgttaagttcgtatctaaacctaagacattaccaaggtttgtacaaattctactacctgacatttattccaagaagatctggaaagttaaataaatttataaatttaataacaaaaaaaaaaaaaaaaaaaaaaaacaattg

SEQ ID NO: 7522 - DNA, 739 bp, Homo sapiens
tttttttttttttttttttttttactgtgaaattctaaaatcatatttattcaccaattcacagaaagtgtcataacgaccaccaacatgaatcagtttgtaggcatttacaagccacagctgaaaataaaaatctgtctgtgttgaataggcatttaacaaattacttgaaaactgcaagaatcataattattataaatttaaagtttgtgattcaaacatgggtaagatcacagtcatggggagaagcccaacagattcctgtgatgatccttattttcttcctatatctttatatacatagagactctcagcgcccctcactctgtgtcagtctgaattggatatgacagctcagttaggcctgagagaggattctatgaaaaggagtggggaggggaaaggacattttctctgaccctctgtggctgggcaaccttgttgactgagaagacagtgcgctcttctgaaattagattcaattttctataaattcatacagtccttctaatgagatactccaaagtctgcattgtttcacactcatacacaatagtatatttatcaaataaacacattttctagactaaaaagattcattctttgaggcagcttgaagagctcagaagtctgatacatgtcaggtacacactggtccaccgctggagcaaagccatccactgtgggagacaccggccagactggcagtaatggcccagacagtagcagtgattgaagg

SEQ ID NO: 7523 - DNA, 1444 bp, Homo sapiens
  misc_feature (1404)..(1404): n is a, c, g, or t
gtgttgccttgtgcgcgggctttttgccctctgggcgccttcaaaggggcatgtccccgggtatttggccccccttttttgttgtttgtgctggctttttttttccacatcataaaatatttattaataagtaaaatgattttcccctgcctttggttattaaaaaatgagtatcattgatgataccaattgccaacactggttttacattattcagtcatgaaacagaatagaaagatgatcgatagatatctatagacataaatgtgtagaagaccataccatacagcgatttgtttaattacaaaatactggttgtgctagcagttggaaatgtacttgcacatccttaaagttatctttttttatataagtaaagaacacacaaataaattcacttgaatttgataatttggaacattggcaatgaatacagtgcctgttgaggcctgaaagagagaggaaatcaagaacagtgtgggagaagaaaggcaatccttcgttgaaaagcttttctcttaacaatccttagtgcctgaaaaataagccattttgataacaagagtataaaaagccttatgatctgcaaagtaaatcgtatctggtttaaatttcatcccaagtctcaggttatggctgaggagctatactaagtatctttgtaacacatttctttgaatttttataacgtaagacaagaaaatttttttatcagatctaggcagaaatactgatcttcatttacaagtatagtaattacttgcactcaggactatatagacatggggctctgaaaaccaaacagaaggaaacgccaaaccataaccacaaggcaaaattaaaagtaactcagagaagcagcgggtgatagtttatgatttcaatataaaaaagaatgcattacctctcagatgtcaccttaaagccagaaaattaagatacaatcaagaaggggatgaatggttttatgactataccacctactacttcaagattaaaatcatcccagagttctgaaatgtcttcattagttaagtaactatacaatttatttcagtctctttttaatgtagaaaatcactttgtaataagatctctacataaggtaaaaaagcacaaaataggcccccaaaagcacaaaaatagacaaaatatatatatctttttacaatgaaattaaggtgtgcctgtggaatactgagactgatgactgatctcacagagttcaaacaggtttccttttagagtagtcctgttatttgcgtcttccccttaaccttggatgcattagaaaaaaaaaaaggctcaggctgggggcggtggctcacgcctgtaatcccagcactttgggaggctgagacaggcagattgcttgaggtcaggagagtgagaccagcccagccnaacatggtgaaaccccatctgtacaaaaaaaaaaaaaaaa

SEQ ID NO: 7524 - DNA, 1041 bp, Homo sapiens
  misc_feature (892)..(926): n is a, c, g, or t
gcgtagaccttgtctgactgtgctcatggccaggcaggggggacagtgtatgcaagagtaatgtggagtttgtgctaactctagccagcttaattagtgactggataaattgcacaactctcacattcttctgttttttcctccgtggaaatagtactcatgctggggaatgagtgacattgaatctctgctcttttttcccctcttttctaggattactacagcatcccatttcccacacccactactccgctgactgggagggatggtagcctggccagcaacccttattctggtgacctcacaaagttcggccgtggggatgcctcctccccagccccggccacaaccttggcccaaccccaacagaaccagacgcagactcaccataccacgcagcagacattcctgaacccggcgctgcctcctggctacagttacaccagcctgccatactatacaggggtcccgggcctccccagcaccttccagtatgggcctgctgtgttccctgtggctcctacctcttccaagcagcatggtgtgaatgtcagtgtgaatgcatcggccacccctttccaacagccgagtggatatgggtctcatggatacaacactggaagaaaatatccacccccttacaagcatttctggacggctgagagctaatttggcccaaggctgggggctgtgttttgtgtgtgtgtataaatttgcactgaagtcttgtttcagaaaccagaccactgaggagagcctgctgagctgaggccatggcctgcgtggcttggggaaatgagttggtggataccttctgggcttttgaacttgcccctcccccatttccctctcccccatgtgtctgaccctgtcttacccatttcaagttcannnnnnnnnnnnnnnnnnnnnnnnnnnnnnnnnnncctgctgttgcttttgatttctggaaggcatgtagtttcaacttgtaacaaaaatatttgtagtcttcaataaactgtggtatttctttagctaaaaaaaaaaaaaaaaaaaaag

SEQ ID NO: 7525 - DNA, 1807 bp, Homo sapiens
acagtttttgttgctttttttttttttttttaactttgaaaatttctttattacagacatttcagaaccatttaaatcaacagacaaggaaatttttagacataacatactgtgtttatcttgaggtacacattgggcccattagataacgttttggaaagtaatgccattgttaactggtagttaacaacccaagttttccaagcaaagaaactgtaaagatggttacaaaattctttgaaaagaatacaccatttccatttaagataaactctccaaattcttaactgatttcaatttttaggcttagcttaaatattttaaatgaaacaatatgagagtgggagaaaaggtttatagctaagaaattatctgagccctactacatgagattgtaaacaaaggaaatttgcgatctgataagctctattacaaaatttatagcctaaaaattagagcagcaaaattacagaagatatttgtatatagtttaaactgaaatcacgtttattccttgtttctggctatcacaatgagacaaattttaaaacaccaagttttaaagactgaacagtgtgatttaacatgatgtaaccatgagaatcccgtattattacaatcccacaatctaaaaactctacttcacataatttgcactctaggccttttattcttcttgctcaagcagcctggtgcctttaggtaacttgaaagatagtggaaattgatataagaggcatgtttctgaaagccccctacgtccaacaacagatttaacttttctggtagactgaaattaaaatttcctttgaacagttcgctaggttctttgaaggattatttgttttccagtttgttattcaaaatgttaatcttatacttggctaggcacgatgagtagtgaccttatacaaagtgtttagaaaatgaaggaccctccatccttccacaccccacctcccatccctggacttctcagggagctgtatggataacatgcaggtggctgtggaatgtgagcagagactgtttatgcatgtgtctgagaacagttggaacggactgtcataatatttcccataagattgttgtatttcgacatgagacaagaataaacactgcaatttagctgaatgggcagttcactgcaacttcataaactgcaatgatatatgtgggttgaaagaatgtaagtaaatttcacagttcataaagttgagcagctcaacttaaagaagagaaaacttgcaagattgatctgtgagtgtctgaattctgcctcccaacatgagtcaggtccacattatacattttagttgcttggcttggtttattgcctgattttccttttcctgatgggggcccatgatgatttttgcccatgaatcctaaggacccaaaagggtcttgtttagatagacacttcctctcttttgattacaggggacctgccagaggagataagatgataagtcttgacctggctggttagaagggttctgtgtgtggatctctgggcatcacttttcactgcagaatcgcagggaagggctgtgaaagggaagggcttctcgaaagggaagggctttctccttattatccctgctttgcatatcttgtcatgattctcttggagctatgaatgctctgtccagtcaggacaccaaggtccttcacagacaggtgctcagcttaggaatggcaatttcatttatttgtggcatttatttgtgacagaagatatttattacaattaaaagaattccaggtcagtaaaaaaaacaaaaaacaaaaaacaaaaaaacaa

SEQ ID NO: 7526 - DNA, 3079 bp, Homo sapiens
cttagcaggagagagaactggggctctcaccgacgacttgaatgtgagactgagagtgggacggtgacggcgggcgcgaaggcgagcgcatcgcttctcggccttttggctaagatcaagtgtagtatctgttcttatcagtttaatatctgatacgtcctctatccgaggacaatatattaaatggatttttggagcagggagatggaataggagcttgctccgtccactccacgcatcgacctggtattgcagtacctccaggaacggtgcaccccctccggggatacaacgtgtttcctaaaagtagagggaggtgagagacggtagcacctgcggggcggcttgcacgccgagtgcctgtgacgcgccggcttgacttaactgcttccctgaagtaccgtgaggttcctgatgtgcgggcggtagacggtaggcttatgcggcacgctttcgtttccaccgtggctactgcgctttgggaaggccacgacctcctcctttggggaggtccttaggatctcagcttggcagtcgagtgggtggcgaccttttaaaggaatgggacccacccggagttcttctttctcctgtctctctctctctctctctctctctctctttctctctctctctctctgtctctccgtctctctgtgtctgtctctgtctctctgtctgtctctctctctctctctctctctctctctctcctctctctgtctctctctctctttccctctctctctctcttcccccccccccgcctctccctcgctctttaggtttcccccaccccctcccaagttctggggtacatgtgcaggacgtgcaggtttggaacataggtacacgtgtgccacggtgctttgctgcacctatccaccagtcgtctaggtttgaagccccgcatgcgttggctatttgtcctaatgctctctctccccttgccccccacgccccgtcagggcccggcgtgtgatgttcccctccctgtgtcccatgtgttctcgctgttcaactcccacttaggagcgagaacatgcggtgtttggttttcgcttcctgtgtcagtttgctgagaatgaggccttccagcttcatccacgttcccgcagaggtcatgaactcatccttttttatggctgcgtagtaattccatgctgtatacgtgccacactttctttatccagcctatcattcatgggcattcgagttggttccaagtctttgctattgtaaatagtgctgcagtaaacatacgtgtccacgtgtcttcctagtaggaacttcttcctcttcagcccgctgagtagctggcactttaaggcaggtgccaacgcaccggcagcaagcttccttttttgcccgggaaaaactgaggtgcaggtagtataagccattgatcacggaacgcacaggagcagagctcgagtccaagcatcgtggctccacccgtcatgctggatgcatctttaggctccgctctaggtatgtgtatcctttacgggatcagccaccggcagttgccttgcgagcacgatgacaaacctctgccggctcttttgggtctcatccctgtatctatacgttgcatcccaacataaagaccggaatgttcctttcgctgacccagtctctcaccctttccaaactccagaaatcttgtctgtcctcggaagaactccccctgcttctttctctaaaggctgtcttcaggccgggcacagtgggaggatcgcttgagcccagaaggccgcagtgaggtgagatcgcgccattgcactgcagcccccggcggcagagccggagccccgtctcgaaacaaacaaacaaaaaccaaccaaccaaccaaccaaccaacaaacaaacacagacaaagaaagaaagagcccaggcaacctagtgaaaacctgttcgggctggggcgtacctgtaccccagctgttccggaggctgaggccaggaggatgggtggacgctgggaggtggatgctgcagtgagcagtgattgcaccactgcactccagcctgggtgacagagccagaccccgtcccaaataaataaacataaaaataaaggaaccagtttgtagaaagcgggagagggtcccattgaacttcaagccttcgagcaacagctgtggctggacaggttggaccagcaggctggagcagtcgccatcttggcagggatcattgaccctgatctatcgtcgggaggaggaagagccgatcttacgcagggagggcaggtggactatgtgtggactctggtgacctgtttgggtgccaggtgttactcccagggccacccgtaactgtgaatgtgcaggaaccctgacttgagaagggcctggccacggggggcttaggcccctggggaatgagagtttggttcccggtacccagggaaaccaccagcatcggcagaggtgatagctgaggaggagcggggatttggacgagagacacaggatgagtaccggggggcagccccgtgatcaacaactgctgcaagaggggccgtttgttcgactcgctagtcttctgcggctctatgcggtactaaagagcagaagacagaagatacaaaaaccacaaaaagtagccgggcgtggtgctgcccgtcaataatcccagctactcgggaggctgagacaggagaatcgcttgaacccgggaggcggaagtttcagcgagccgagatcacgccgttgcagtccaacctgagcgtccgagcgagactctatctcagaaaataaagacagaatgaaagagcccggcgcggtggcttacgcctgtaatcccagcgctttgggaggccgaggcgggcggatcgcctgaggtcaggagctcgagaccagcctggccgacatggcgaaaccccctaaaaatacaaaaattagccgggcgtggtggcctgcgcctgtaatcccagctacccaggaggctgaggcaggagaatcgctggaacccgggaggtagaggctgcagtgagccgagatcgcgccactgcactccagcctgggcgacagagcgagagtttgtctgaaaaaaaaaaaaaaaaaaaaaaaaa

SEQ ID NO: 7527 - DNA, 1690 bp, Homo sapiens
attagcttaaatgttacggccacttaaaaattctacatatgactattgtttaaatacatttttcatgtctctgatgtagtccttatttgacataagtattttattcactgcttaattgttagatagattatagacagctgttactaagtaatactgctccattagggcagaaacagaaactttattttaattaaatgtgtactaatgtttgagtttctatattttgctacagtgataattccagtaaaataaactgtaggcctctagttgttttagaattttaaaactgtaaatggactcagagaatcagtttcttattagacgtcatgagagtatatttttttcattatgctttaagagggaatttgtaacttgctcaggtaacattcaagttttctggtttgtgtttgtccctacaattaaacacactgaactaacaggaaaaggttacatacatttaggaacaattgcacttttaaagggagagaatgcatagttgctcacatatctcagtgtcagtcacctaacatggatcagtgctttatttgagattacaaaactagaaaatgacggagtcaaggctaggaccaatattctgttcagtcttagataattatagaatacacattaaaatcagatatttgaattttcttaattttgtaactatttgtcattgaaaggagatactaaaaaaattatatatcgtcctagaaagtacatgaactaataatgcatttctaaaggtgaaaaaagaataggtatttttctgtttaatattcaattttatagagagtagtacgttaatttttttaaaccccagaagctcaggatcttatcattttaaaagaaattatcaccagttctgtgtgagtaaataaagtattataacactttgtgtttttcatccatgataccttgtatttacttacctgagctttttttctagggaaagaaaaatgctcaggtaataacagagccttgaaaaatttggattttcaaaactacctatttatgtataggcctttagatcatctgatgttgaatactctttaagtgatctaaaggcctacatataaaaaggtatttttattaaattctggaattaaacatttcagcattacaagaaaagaaagcaaatccactggaacaattctgggaaagaaggaaagactgtgattaaatgcctcttaactacttcagattcctggattgatgtcttatctacaggcttctttttaaaaatgattggctgtgagtttaccaggattatagttgaggctaaaggacagctcctcaggaaagcccctgttctacatctacggtcacatgctggaccttgagttgtcactcagagaaaagagtgccatctaccgaaactccacagtttccattgtgaatggcttctttggtgcagagttccaaaaattatgtagcccagctctttaattttgtaacatctaatgatatcaccgccttgaagtgattaaagtagattgcttaaagaattaaagctttaaagatgaaagatgttattgcttttgctggacatgaggaacagttgtaaagtttccaggtctacaataactttctggagccctctcagtgaactgtttcttgtaaaagttttccctaagataaaagctcaatcccattgtttccacactcaaaaaaaaaaaaaaaaaaaaactcg

SEQ ID NO: 7528 - DNA, 2027 bp, Homo sapiens
atcatgaatgggatgagtgtcctgatgaaagagaccctgaagagctctgtcaccccttcaccatatgaggagactggggaaaggcagccatctgtgaactgggcagtgagtcctcaccagacacagaatcagtgggcacgttggtcttggacttcccagcctctagaactgcacacattctggcagttccgccatgagaacccccagacccgggttgggggcccgccccccgaggggctgccgggcttcaacagcggggtgatgttgctgaacctggaggccatgcgccagtccccgctctacagccgcctgctggagccggcgcaggtgcagcagctggccgacaagtaccacttccgcggccacctcggggaccaggacttcttcaccatgatcggcatggagcaccccaagctcttccatgtgctggactgtacctggaaccggcagctgtgcacctggtggagggaccatggctacagtgacgtcttcgaggcctatttcaggtgtgagggccacgtcaagatctaccacgggaactgcaacactcccatcccggaggactaggcgctccccgtgccttgcccccggggcctccagatctgggggaaggacagggttccttgggacagacccaagggcagtgtctgacccgctagagagacaccgcagggaagtcctgtgattaaggtgctgagacctcctgccgggcaggtcactgtgctgaggccacccgccaaggactggcctgtgcactgctggtgcttgggaccttattcctccagggagcaggcgacacaaaggacacgcatgtccagtgggctgggaagcaagcacttgaagagaaggaaggggagaaagggtcccccttgctgtctgcctctgaggaatggaaatcctttagacccggccttttttggaccaatataaatttaatttaaattgacagccttccatttttcgagaaagtacaaacagaactgctttagcacccatcgagccccaaacgggtaaggtaagccaaggttttaatgaccagcccagtatctaagcttccaaacgaatgccagcccatcacatactcaccctgggaggctgctgcacgcgcattctcctgatgctcacgtcacttggtgtaggtttcaggatcgcctctttgaggaaggacttcaggaccaactggggcctgcataagaaaacttatctcattattagagtactcacagcttgtatctcccagctacatcctagaaccccattgtcctttattccaccaaaccagctccaggtgaccagactctactcagaaagcaaattcgtcatcaaagaacagagactggccaccacaaggacatgcaggagaactgtcgggaccaggaagactcattccaaaaagcccaggccgggcacagtcgtcaagcctgtaatcccaacactttgggagaccgaggtgggggtatcgattgagcctcggaggtcgagatcagcctgggaaacacagggaggcccccatcgctacaaaatattttaaaaattagccaggtgtggtggcttgtgcttgttgtcccggctacttgggaggctgaagtgggagggtggcttgagtccaggagttcactgcactgagctgtgatcacaccactgcactccagcctggacgacagagtgagacgtccatctcaaaaaaaaaaaaaaaaccaaaaaggaacccagcaattcccaagtgtgaccatgtgggcttggaagacatgtcactcatgggctagtaagcattctagtttctttgtttaaaaaatccccttatcataccacgttagaccgtagaccttagcagaaattaaagcgtcatttcttttgatggggcctcctgtacgtaggctgcagacgtgaaagccccaggggtccatttgtatcaattttcatcttgttttgttttgatttcatttacgtttttctttttcccatgagtgaggatagccaataaatcatctttgagaacatggtaaaaaaaaaaaaaaaaaaaaaaa

SEQ ID NO: 7529 - DNA, 4365 bp, Homo sapiens
  misc_feature (244)..(281): n is a, c, g, or t
  misc_feature (3722)..(3767): n is a, c, g, or t
gagatgacaatagggagaatggagaacgtggaggtcttcaccgctgagggcaaaggaaggggtctgaaggccaccaaggagttctgggctgcagatatcatctttgctgagcgggcttattccgcagtggtttttgacagccttgttaattttgtgtgccacacctgcttcaagaggcaggagaagctccatcgctgtgggcagtgcaagtttgcccattactgcgaccgcacctgccagaagnnnnnnnnnnnnnnnnnnnnnnnnnnnnnnnnnnnnnncaagagatatgggaaggtgcccaatgagaacatcaggctggcggcgcgcatcatgtggcgggtggagagagaaggcaccgggctcacggagggctgcctggtgtccgtggacgacttgcagaaccacgtggagcactttggggaggaggagcagaaggacctgcgggtggacgtggacacattcttgcagtactggccgccgcagagccagcagttcagcatgcagtacatctcgcacatcttcggagtgattaactgcaacggttttactctcagtgatcagagaggcctgcaggccgtgggcgtaggcatcttccccaacctgggcctggtgaaccatgactgttggcccaactgtactgtcatatttaacaatggcaatcatgaggcagtgaaatccatgtttcatacccagatgagaattgagctgcgggccctaggcaagatctcagaaggagaggagctgactgtgtcctatattgacttcctcaacgttagtgaagaacgcaagaggcagctgaagaagcagtactactttgactgcacatgtgaacactgccagaaaaaactgaaggatgacctcttcctgggggtgaaagacaaccccaagccctctcaggaagtggtgaaggagatgatacaattctccaaggatacattggaaaagatagacaaggctcgttccgagggtttgtatcatgaggttgtgaaattatgccgggagtgcctggagaagcaggagccagtgtttgctgacaccaacatctacatgctgcggatgctgagcattgtttcggaggtcctttcctacctccaggcctttgaggaggcctcgttctatgccaggaggatggtggacggctatatgaagctctaccaccccaacaatgcccaactgggcatggccgtgatgcgggcagggctgaccaactggcatgctggtaacattgaggtggggcacgggatgatctgcaaagcctatgccattctcctggtgacacacggaccctcccaccccatcactaaggacttagaggccatgcgggtgcagacggagatggagctacgcatgttccgccagaacgaattcatgtactacaagatgcgcgaggctgccctgaacaaccagcccatgcaggtcatggccgagcccagcaatgagccatccccagctctgttccacaagaagcaatgaggactgcccagtggaggaggggcgatgtggctggggagctagggagagactctggaggtggtgggtctctggggagacccctaatgaggaagttgaggtaatgcttaacattgttgctgtgagaatttactgccctgtgtttcccagagccattttggctcaattcaagtctattcaattcaagttaactctagcccagcccagatcaactcctcctacaaatattattggatgataggccctagaacccaataaaggagctccaaatgtcgttgggtggggaagcaaaatgtagagaaacatttaaagcacactgtaataataaatgcaattataaactatatggaggagggtgcagaggagggaatgtgtctggtgtgtgatgtgtgtgtgtgcagtgggggtatcacagagagtatgacatctgagttgagggtagcaggtgcctggagtctcaggtggctgctcacccatctgtgcaggtgtctctggggctgctggtctcacctgtggtctgcagtagacacaattggctgagcaggatatgtgatactgtgtggttggtgtggagttttgaagaaggggctgtgtttgggccacgtaggctctactcagagacctgaaaccacttcagaatggtgcatatgtcgaaagagctggctgggggccttgcccaaaccaactgaggtcttaaagtccggggaaaaaaagtctgggttccaactagaattctagaaatatttctagaacacacagagagggaataagtccctctatcacccttattaccaagccttgtggttccctgtgattttagataatgtctgatatttttctggctatttgcctagtaggatttaaaaaatattttcaaagtgaagctgagagagaatcttggaaacacacatacctgttgatcatgggccctgcagaattggcccttgggggctttatttggttatgtgtgcctgggtggtctttaccagcttagactctatcatgggcccccatgaagctccattctcaatactgaataattattacttcccttgttgagtttctttttctgtcatgccctgggggcttctgctcttctcaccagaaagaacatttgaatctggattcttgtacacctgggttagaccctgttcagaggtgtggccaatttatcccgatctcctggaaggctgttgtgatttccatctaagaaatgagggtcttgagaatcaaccagtcccaagattagcctgttatcctgttatctactgagaccccaaatttctcaccaatgttttgggagatcctggaaaagatcccttcagtttggggtgtcaccaagacttctacacaacccaggactaccattgacctcagagctgtaccccacatcttgaagtaaattgatcccaccaggtcccacgtttgttatctctgcctaaatgttagcttctccatcctcaccacatgatgacctgctgtgtccctctgagcactacccagtggctgaaaactctgcaaatgggccacacttttgcaaaatacttgtatctgacacttaggtcttgtttgaagaatttcctttctggaaggttttacaagaagactgatagtctttcaagcccccacatcacaggcttagggacggcactaactttctcccagggatctaactggctagttcaaattatcactcttttaccttcatataaaatgtctcccccaaacctttttcccttctttgtcattgttatctgctaagccactggtcatttccccatattcgtagtctttttttccatcctatctttctaatatttgttgtctttaacaaactgtgttctgtgtctgtgctcctccttccctctcagaccattggaatgcaagtccttcttccctttggaatgtactctggatcccttcccctgctttgacccccagactttgctccatctattattgcttctccatcctggatccttgacatttgtcaccccactggccttctcaggtgcaatcagtaaaaatgctgagaactcttggatcttaatcttcatgactgagttttttttagttgtatagttatcatctgcctttcttcactttgcatttcttcttgaatccattgcagattgacttccactcccactccttcactaaaagggctcttaccaagatcaaatctaatgggtacattttagttcctatgtgatttggcctttcgatgtcaatcatcactcccagccatnnnnnnnnnnnnnnnnnnnnnnnnnnnnnnnnnnnnnnnnnnnnnnctcaggttccttcgctggtcctttttctttccctgcccctgacatattgacatttcctggagttggttttgtccttgattcattctcatgtcattctgcacacagtctctgcatgaactcaggcagacccttcatttaatgaccaccttagggctgatgattctcaaatctgtattccccgatcttgcatttgagctccagccccactcatcctctcggatgttctgcaggcccagcaaactcatcatgtccaaagtgaaactttttctctttcctgtctcctctcctctgatctgttctttcttggaacaccacccaagaacgtcacctcctccatcagattgtgagctcctggagggcaggagctgtgtccttctattcatcttcctatccccagaaccttgcacagatcctggaatgtggtaggtgctcagtaaatgtgtgttgaataaatgaatgaatgaatgaacaaatgaatgaatttgcttacttcaaggcaaaagaaccatgaaactgtattttgagtttctatgttatagcagtcagcaaatcctattaaatactttgtgtttccaagcaaaaaaaaaaaaaaaaaaaa

SEQ ID NO: 7530 - DNA, 2612 bp, Homo sapiens
  misc_feature (286)..(308): n is a, c, g, or t
agcggatagggaggtcgggtagaggctcccgggacctgcgtgctgccgagagaggaagcgaagggcaccatctttgtattttgtgtcatgacttctcaagagaagacagaagagtatccttttgcagatatatttgatgaagatgaaactgaaaggaattttttgttgtccaaacctgtttgctttgttgtatttgggaaaccaggtgttgggaaaacaacattagcccgttacataacacaggcatggaaatgtattcgtgttgaagctttgccaattttagaannnnnnnnnnnnnnnnnnnnnnnatcaggagttatgttgcaatcaatgttgatcagcggtcaaagcattccagatgaacttgtcataaagctaatgttggagaagctcaactccccagaagtctgtcactttggttatattatcactgaaataccatcactttcacaggatgccatgactaccttacagcaaatagaattaattaaaaacttaaacctgaaacctgatgttataatcaatataaagtgtcctgactatgatttgtgccagagaatttctgggcaaagacagcacaataatacgggatacatatacagtagagaccagtgggatcctgaagtcattgagaatcataggaaaaagaagaaagaagcccaaaaggacggaaaaggagaagaggaagaagaggaagaagagcaagaagaagaagaggcatttattgccgaaatgcagatggtggctgaaattcttcatcatctagttcagaggcctgaagattatttggaaaatgttgaaaacattgttaagctttataaggaaacaattctccaaactttagaagaagtaatggctgaacacaatccccagtatctcattgagctaaatggaaataaaccagcagaggagctctttatgattgttatggatcgacttaaatatctgaacctaaaaagagcagctattctaaccaaacttcagggtgcagaggaagaaattaatgacacaatggaaaatgatgagctatttcgtactcttgcatcttataaacttattgcaccaagatacagatggcaaagaagtaaatggggacgtacatgtcctgtgaatttaaaagatggtaacatttattcaggattaccagattattctgtgagttttctaggtaaaatctactgtctttcatcagaagaagcattaaaaccatttttgttgaacccacgtccctatctgcttccacctatgccaggaccaccatgtaaagtattcatacttggacctcaatattcagggaaaacaacactttgcaatatgcttgcagaaaattacaaaggaaaggtgactaactaactatctgtctatctatctatctatctatctatctatctatctatctatctatgtctatctgtcatgtatctatactcgattataatttgtaggattttatttgtactcagtttttaaaatttcatgttttaattgaataattgttccactgggcttggggtagggtaggcattctttttgttgtttattgctgcttccagaccagagtccctccctgcttcccaaaagctcccacatgtgaatatcgtgtcattcagactctgccacctattagctttcttggttctactcatcttctgtcccctgggtttcacttctcctggctcactctcactctccccatataatcactcctgtcctaattcttggtgatttcagtattacaaagatgatcctcccaacaccttgacacctccctcagtaatcttgttctccactctcagtaaatgaaattatttttagcttagacaagagtgatagcagtaaaagtggtatgaaacaagcatatttgggatataatttgaagacaaagctgaaagatttgatgagggattggaatgtggaggaattctagaaggggcaatgtggcttgaggattgcctatgcaagaaggaatggcacaagatcatggctaaagacagagcaattcaggccacagaaaggtgttagaagttgttcaaagtgctgttgcattcttttaagcgccggagtatcattttctatttgcttttaactttttcattgtgaaacatgacaaacatacagaaaagtgaagcccactgagttaccgcaaaatgaacccccatgtaaccaccaaccaggtcaaatctggaatgttgccagcacccagacgccctctcatgtttcttctcaataccagtctcctcactctccacacaaaggtaaccactgcccagaattttatggcattcacttccatacttctcctatggttttgccgtggaagcatacatccaaataccataggctagttttgcatggtttttttgaattttatagacctaaacaatttatcttctttgtgcctggcttctttcacttaacattataattatgatatttgtccagactattgaatgtagctgtagtttattcatttttattgttttattgtattctgttgattgacttataccataatgtatttatccacatttgagcactaataaaacttggattgattccagattggagtaaacaaaaaaaaaaaaaaaaaaaaaaaaaaaaaaaaaaaaaaa

SEQ ID NO: 7531 - DNA, 2343 bp, Homo sapiens
ggggagtgcctgtgtggctgagggacacgtccaagctgcagtcggctctgtggttgtggacacctggcagaaccatgccttctctagtctgggtcatccaaacacacgtggggtgcaggggccaggtggagccctcttgtcgtttttgttatctaacggtaattacggagtccagaaagagaattggaaatgccggcagtttaattaaagctgaatggcaggagaggggcatttggaggctccctccctgccttcactccccgtcctgccgcccaggcaggatgtcagatgaggagacgttgagctcatcaaacacccaatgagaagtcttacaacatcagaagctgtctgccaatgcgcctgcgacagcttatagaaactgctgccgcctcgaatcaacctctctccccaggcattgcacgtcagtaggtaaccaggtcattgctgtggtcatggacctcttcactgatggtgatatctttcaagacattgtggatgctgcctgtaagcgccgggtcccagtgtacatcatcctggacgaggcaggagtgaagtatttcctggagatgtgtcaggacctgcagctcactgacttccggattcggaacatccgtgtccgctctgtgacaggcgtcggcttctacatgcccatggggaggatcaaggggaccctgtcatcaaggttcctgatggtggacggtgacaaagtggccactggatcttacaggttcacctggagttcctcccatgtggacagaaacctcctcctgctcctgacaggacagaacgtagagccctttgacacggagttccgggagctgtacgccatctccgaggaggtggacttgtaccggcagctgagcctggcgggcagggttggcctccattactcctccactgtggctcgaaagcttatcaaccccaagtacgccttggtgtcaggctgccgccacccgcctggggagatgatgcgctgggctgcccggcaacagtgggaggcgggcggcaacccggaggggcaggaggagggcgccagcggtggcgagtcggcctggcgcctggagagcttcctgaaagacctggttacggtggagcaggtgctgccccccgtggagcccatccccttgggagagctgagccagaaggatggcaggatggtctctcacatgcacagagacctgaagcccaaatcccgagaggcacccagccgaaacggcatgggagaagcggcccggggggaggccgcccccgccaggcgcttcagcagcaggctcttcagtcgccgagccaagaggcctgcggcgcccaatggcatggccagctctgtctccaccgagacctctgaagtggagtttctgacggggaagaggcccaacgagaattccagtgctgacatctcaggtaaaacaagtcccagttctgccaagcctagcaactgtgtgatttcctgagctgcgggatggtggtgggcaggacgtgtggatgcctgcctgccctgccctgtgctgtggagagcgcaggtcgcacactgcaccagtttgcacatcagacgccaactggccttctgccctgcagcctccgtcctggcctcagggacgctggatcccaaatgagagggtccgaagcatctcagtcacacgcctccaccggactgtcggtggctgggcaggggtcagtgccacggcctccttgtttacatgaagtggaagcttgaccagtgtctgctcgcctttgtgccccaccccctccgctgattgccagatggggtgagggcccattctttaaacctttatggggtggggtgtctggggcagctgcagtggcttctcctttcccaggcttcctggtgcttctggttccccacgccactccccacccaagagattggtggaataaaagggaagagggcagggccctgagcctggaaaaaaaaaaaaaaaaaaaaaaaaaaaaaaaaaaaaaaaaaaaaaaaaaaaaaaaaaaaaaaacgcatacaccaagacaaaagcaaacaggagcaacagaatccacaacgcgccagacagcagcagagacgcctaccaaacaagccacagacaacaccaaaagaagcgaaacagcagagcgcacaacgacagcagcaccaccacacgacccgcaaacacgcgggagaggcgaaagaggacaccaggcaaggcaagccagacgcacgagacacaacacgccggcgagaacgaagcccagcgacggggccgacacgagacgacacagcgcacaaacggacacaaacaaccacagaggcgcgacaaccacaccagacgaccggagacagagagagacggcagacaaaccaccgcaccgcgg

SEQ ID NO: 7532 - DNA, 2020 bp, Homo sapiens
  misc_feature (446)..(489): n is a, c, g, or t
ggcagggcgccctgggctgggagcaacgcgactgaccgtggtcgtgggcggacggcggctgcagcgcggaggagctggggtcgctgtgggtcgcgaagcagagcccgggacgtgcgcgcttggtgcacgatcctgaaggggagctccgaggggcccgggtctccagggctgctgcggccattcccggagcccggcgcggggcccgcgagatactggtttaggccgtcccagggctccgggcgcacccggtggccgctgctgcagcggagggagcgcggcggcgcgggggctcggagacagcgtttctcccggaagtcttcctcgggcagcaggtgggaagtgggagccggagcggcagctggcagcgttctctccgcaggtcggcaccatgcgccctgcagccctgcgcggggccctgctgggctgcctctgcctggcgttgcttnnnnnnnnnnnnnnnnnnnnnnnnnnnnnnnnnnnnnnnnnnnngaaaaaactaattatggttcagcactggcctgagacagtatgcgagaaaattcaaaacgactgtagagaccctccggattactggacaatacatggactatggcccgataaaagtgaaggatgtaatagatcgtggcccttcaatttagaagagattaagaaaaattggatggagattacagacagttcactcccttccccctcaactctcccaatcattaacatcttctatagtgtgttacatttgttacaattaatgaactgatactgatactttattattaaataaagtttagcattaacattagggtttactcctgtgttgtgcggctttggacaaatgcaggagagcaagtcccacccagtgtgctctggagcagccgctggccctaaaccccctgagccatacctccccttcttcctccccttgaacccccaagcaaccgcgaatctcattcctgtctcttaagactaccttttccaaattgtcacgtcgttggaatcatacagtatgtagcctctgcagactggcttcttgcacttagcaatgtatgtttgcagttcctccagtgtcttttcatgactcgacggctcattggtttttgttgctgaaaatattccattgtttggatgtacactttatcccttcacctataacagcttgtattttcgtgtgcagttttatgattactcaaattgcacttgtagatatatcttaacaaacacttcatacaaaataagcatagtattattttattcaccaaagtattgttaattagcagagctcaattctttggtgtcagtttatcaaatttaccttctaggttttgagtttattattaagaacctgcgtagacttattttattttttaatgcataggatcttttgccagaaatgagggcatactggcctgacgtaattcactcgtttcccaatcgcagccgcttctggaagcatgagtgggaaaagcatgggacctgcgccgcccaggtggatgcgctcaactcccagaagaagtactttggcagaagcctggaactctacagggagctggacctcaacagtgtgcttctaaaattggggataaaaccatccatcaattactaccaagttgcagattttaaagatgcccttgccagagtatatggagtgatacccaaaatccagtgccttccaccaagccaggatgaggaagtacagacaattggtcagatagaactgtgcctcactaagcaagaccagcagctgcaaaactgcaccgagccgggggagcagccgtcccccaagcaggaagtctggctggcaaatggggccgccgagagccggggtctgagagtctgtgaagatggcccagtcttctatcccccacctaaaaagaccaagcattgatgcccaagttttggaaatattctgttttaaaaagcaagagaaattcacaaactgcagctttctaaaaaacaaaaaaaaaaaaaaaaaaagatctttaattaatcggctccatgcctgtgaattggatgttgtggtccctgt

SEQ ID NO: 7533 - DNA, 492 bp, Homo sapiens
ttcatggtctcctggaagctttggctggagactactcagctcgtcactgaactaacggcttttgggggttcttttttcccagttgagtttctgtgtcttttacacgtttggttttatggtccgttggaggttttttcacgctgagggtgaagattcttagtttcctcaattagcataaaagctgctccaaggctgctgagtcttcagttccattccattcaaaatgttaattcctgagacacgcaacctacgccctactgtcctttgtcccacggcttctcgagattatctctgtgttttaatagataaaacgccttctctccccacccgtggggtgcaaagcacagcgcatggggctggtggcgcccgagagcatcacacaacgcatgcgccagtccgcaggtgtgggcggaggagaaatcgcgtcggcggcaggggatgacgtaaaaaggccgcgctgtactgcggcttgtgccgcttccgcaagaaggt

SEQ ID NO: 7534 - DNA, 1916 bp, Homo sapiens
tgaagaatactttcttctttttataagtatcaatcaaatgtagttcagcaatccacccatcaagcgcactaaaaacttttcacgatgccattaacaacttgtggttaccatcaaaagcctacagacctacacactaattatctttaaaacccttattaggctgggcgtgtggctcacgcctggtaatgacagccacctttgggggaccaaggcgggcagatcacttgaggtcaggagtttgagcccagccctggccaaaatagtgaaacttcatctctgctagaaatacaaaattagcggggcgtggtgacagggtgctctaaccccagctacttgggaggctgaacgcagaaccacttgaacacagcccaggaggcagagtttgcaagtgagccaagattgcaccactgtactccagcctgagccacaagagcaagactccgtctcaaaaaataaataaaaataaaataaaacccttattaaggattttaaaaatcttaattatataatgcccaaagctagtccccgtctggcttaggggcccacaagctcctgctttaaagccagtttttttgtttttttctgatgtacttacatttgtgcatcacaatcaagaggttcccagcttggtggaactttcaaagatgaggcagaaaactaaacaggcaattacaatcttacttttcacgctgacaagtggtacggtggctagcccaaactcccctccctgtcccagctacctcccttatagaccattcacgatcacttaggccaggctgccatgtgacctaagagaagacagggagaacacagcatttcttactcctactaacttgcaacatcattctctcaagttgctctcattggaggctcccaactgcttcaagctgcccagtgatatttgtatttctaaagtgggcaggcatggccatttccagaaaaagaaacacattcagacttgtgccttttgttacccaaatatatgatattcaaataatttctattttaacaactcataaaaatttaagatcaaataattgcattcttgaaacaattcttaatcatttattttcaacacgtgtactataaagaacctaagaaatcagacaattttaataacccataaacatgttgaatccatttgcagatttaaattttgtaaaaatagctgtcactgcctccatatatcaagtgtactatgtttataatcacatttatgctaccgatactcctcagaaaaaaacagattctgcttggttctagcttcagtattatgaactccaataatgctttgaggacctccaaaggaaaaaaacagattctactaggttctagctgaaatattatcaactccaaattgaagctgaagtattatcaactccaaataatgcttcgaggacctccaaaaaaaagagattctgcttggttgtagctgaagtattatcaactccaaataatgcttggaggacctccacaggtaaactactaatccctttggccatttattgagacagacagagagagagagagagttttgaagcaacaatgtaccattagtaaagttgctgtgcagaattacctcagtcctattctaagcttacagttcagttgattttattgtcctcacctaagtatatacaattcacatatgggagaaaaacactaaatcaagatggttattttcactgttttgcttaagattcatatttaaatataaatcaagaagttaatccacagtttgagagatacttatattagaaattttaaatgttaaatacataattgtaaatatggtgtatgtactgtttcacatacaatgggtattgatcaaatcagtgtaattagcacacccatcagctcaaatatcatttatttgtagcaagaacattcaatacattaactatagtcaccctact

SEQ ID NO: 7535 - DNA, 1870 bp, Homo sapiens
  misc_feature (568)..(569): n is a, c, g, or t
agcggggtggctgttcggagcggcgaggggcttggcgggagcttccagtcgctcgagagcggagagcggcaccatggccccgcgggggcggcggcggccgcggcctcacaggtctgagagcgcaagacgttcaaagaacactttagaaagaacacattccatgaaagataaagctggtcaaaagtgcaagcctgttgacgtgttcgactttcctgataattctgatgtctcaagcattggcaggctgggtgaaaatgagaaagatgaagaaacttatgagacctttgatcctcctttacatagcacagctatatatgctgatgaagaaaattctccaaacattgtggactgtctctctcttcaactcctccaggaaaagaagcaaaaagaagttcagacacttctggaaatgaagcaagtgaaatcgaatctgtaaaaattagtgcaaaaaagccaggaagaaagctcaggcccattagtgatgactctgaaagcattgaagaaagtgatacaaggagaaaagttaaatcagcagagaaaataagtacacaacgtcatgaggttattnnaaccacagcgtcttcagaactttcagagaaaccagctgagtctgtcacttctaaaaagacaggaccccttagtgcccagccctctgttgaaaaagagaacttggcaatagaaagtcaatcgaaaactcagaaaaaagggaagatatctcatgacaaaaggaagaaatcaagaagtaaagccataggctcagatacttctgacattgtgcacatttggtgtccagaaggaatgaaaaccagtgacatcaaggagttgaatattgttttgcctgaatttgagaaaacccacctagagcatcaacaaagaatagaatctaaagtttgtaaggcagccatcgccacattttatgttaatgttaaagaacaattcatcaaaatgcttaaagaaagccagatgttgacaaatctgaaaaggaagaatgctaagatgatttcagatatcgaaaagaaaaggcagcgtatgattgaagtccaggatgaactgcttcggttagagccacagctgaaacaactacaaacaaaatatgatgaacttaaagagagaaagtcttcccttaggaatgcagcatatttcttatctaatttaaaacagctttatcaagattattcagatgttcaagctcaagaaccaaacgtaaaggaaacgtatgattcatccagccttccagctctgttatttaaagcaagaacacttctgggagccgaaagccatctgcgaaatatcaaccatcagttagagaagctccttgaccagggatgagaagagcagtctactaaaatgtgcctataggaagactagtctcatgctgttaccttctgaaactgtacctttataaatcaattgttttgcaaagaagttatggcctacttagaatctaaaatttgttattcaaattaaatggctgtgaacaatgttaaatagcatcagtttgtccaatagttttaaaggccataatcatcttttctggttaatatcttgagtaattttaaaatgttgacaccttaatcggtcccaggtatgagctataataaacttgtaaaattaaaaaaaaaaaaaaaaaaaaaaaaaaaaaaaaaaaaaaaaaaaaaaaaaaaaaaaaaaaaaagcagcaaaacggagaagaaacacggggcgcaacgaacacccagagaaccgacggaaaaacagggacaaaaaagggaacgaacgcagcaaggaacacccggaaaacaggagggcccacgcacaagcgccaagcgcaccaaagggcgaaacagcgcgcccgagcgcggaaaagacagacgctggggcgcaagaacgg

SEQ ID NO: 7536 - DNA, 1229 bp, Homo sapiens
ttagttttctacgctgggtgctcgttgtctcgggggcctctgtgctgtgttcttatttgccgtttctttgttgttttctatgtccctgttgtgatgcccgagttggccttttgcctcctttctatctattttttgtttccttttccctctatattgttgttcgttggttctttttccttctgtttttcttgtctccctcttttgttcatgtggtctcgtttttgtgggtcctttgttgtccccttggttagtggttactggctttattctttgtttccgtcgtgctctgtgcctgtgcttgatgttatggcctcctgcctcccagcccggacccaatgcactttcttgtctcctgctaataagccgccaccctccccgccttgggctccccttgctgcccttgcctgttccccattagcacaggagtagcagcagcaggacaggcaagagcctcacaagtgggactctgggcctctgaccagctgtgcggcatgggctaagtcactctgcccttcggagcctctggaagcttagggcacattggttccagcctagccagtttctcaccctgggttggggtcccccagcatccagactggaaacctacccattttcccctgagcatcctctagatgctgccccaaggagttgctgcagttctggagcctcatctggctgggatctccaaggggcctcctggattcagtccccactggccctgagcacgacagcccttcttaccctcccaggaatgccgtgaaaggagacaaggtctgcccgacccatgtctatgctctacccccagggtagcatctcagcttccgaaccctgggctgtttccttagtcttcattttataaaagttgttgcctttttaacggagtgtcactttcaaccggcctcccctacccctgctggccggggatggagacatgtcatttgtaaaagcagaaaaaggttgcatttgttcacttttgtaatattgtcctgggcctgtgttggggtgttgggggaagctgggcatcagtggccacatgggcatcaggggctggccccacagagaccccacagggcagtgagctctgtcttcccccacctgcctagcccatcatctatctaaccggtccttgatttaataaacactataaaaagttaaaaaaaaaaaaaaaaaaagggttcggaagctgagatgctaccctgggggtagagcatagacatgggtcgggcaga

SEQ ID NO: 7537 - DNA, 1192 bp, Homo sapiens
  misc_feature (68)..(109): n is a, c, g, or t
attgggctgggctctctggaaggtgtgctgctgcctgagctgctggaaaagcactggggggtgtttgnnnnnnnnnnnnnnnnnnnnnnnnnnnnnnnnnnnnnnnnnnagggactttcctctcagccaggaaggattttgatattcatcagaaatacctccagaagattcaaggagctgtagaggtgaagtaagcctgtgaaggaccagcatgggaatcctatactctgagcccatctgccaagcagcctatcagaatgactttggacaagtgtggcggtgggtgaaagaagacagcagctatgccaacgttcaagatggctttaatggagacacgcccctgatctgtgcttgcaggcgagggcatgtgagaatcgtttccttccttttaagaagaaatgctaatgtcaacctcaaaaaccagaaagagagaacctgcttgcatcatgctgtgaagaaaaaatttaccttcattgattatctactaattatcctcttaatgcctgttctgcttattgggtatttcctcatggtatcaaagacaaagcagaatgaggctcttgtacgaatgctacttgatgctggtgtcgaagttaatgctacagattgttatggctgtaccgcattacattatgcctgtgaaatgaaaaaccagtctcttatccctctgctcttggaagcccgtgcagaccccacaataaagaataagcatggtgagagctcactggatattgcacggagattaaaattttcccagattgaattaatgctaaggaaagcattgtaatccttgtgaccacaccgatggagatacagaaaaagttaacgactggattctatcttcattttagacttttggtctgtgggccatttaacctggatgccaccattttatggggataatgatgcttaccatggttaatgttttggaagagctttttatttatagcattgtttactcagtcaagttcaccatggccgtaatccttctaagggaaacactaaagttgttgtagtctccacttcagtcagaaactgatgtttcagctaggcacagtggtacatgcctgtaatcccagctacttgggaggctgaggtgggaggatcacttgaactcaggagtttgagagcagccagggcaacacagcgagaccctgtcccaaaaaaaaaaaaaaaaaaaaaaaaaaaaaaa

SEQ ID NO: 7538 - DNA, 1491 bp, Homo sapiens
  misc_feature (1325)..(1343): n is a, c, g, or t
ccggagccgggagcgccgctccagcgaggcgcgggctgtggggccgccgcgtgcctggccccgctcgcccgtgccggccgctcgcccgccatgcctggcttcgactacaagttcctggagaagcccaagcgacggctgctgtgcccactgtgcgggaagcccatgcgcgagcctgtgcaggtttccacctgcggccaccgtttctgcgatacctgcctgcaggagttcctcagtgaaggagtcttcaagtgccctgaggaccagcttcctctggactatgccaagatctacccagacccggagctggaagtacaagtattgggcctgcctatccgctgcatccacagtgaggagggctgccgctggagtgggccactacgtcatctacagggccacctgaatacctgcagcttcaatgtcattccctgccctaatcgctgccccatgaagctgagccgccgtgatctacctgcacactaaccagctgagaagttccaagcggcgcctcaagtgcgagttttgtggctgtgacttcagtggggaggcctatgagagccatgagagttctctgggctttggttatcccaagttcatctcccaccaggacattcgaaagcgaaactatgtgcgggatgatgcagtcttcatccgtgctgctgttgaactgccccggaagatcctcagctgagtgcaggtggggttcgaggggaaaggacgatggggcatgacctcagtcaggcactggctgaacttggagagggggccggacccccgtcagctgcttctgctgcctaggttctgttaccccatcctccctcccccagccaccaccctcaggtgcctccaattggtgcttcagccctggcccctgtggggaacaggtcttggggtcatgaagggctggaaacaagtgaccccagggcctgtctcccttcttgggtagggcagacatgccttggtgccggtcacactctacacggactgaggtgcctgctcaggtgctatgtcccaagagccataagggggtgggaattggggagggagaaagggtagttcaaagagtctgtcttgagatctgattttttccccctttacctagctgtgccccctctggttatttatttccttagtgccaggagggcacagcaggggagccctgatttttaataaatccggaattgtatttattaaaaaaaaaaaaaaaaaaaaatcacgctcctgccacctcattattttgccttgaagaaacatgggcagggtcggttttctgaagggatcagggactttgctttctggacagttacatggcttatcgccttctgagnnnnnnnnnnnnnnnnnnngagttcattggtaagaaatacgggggggcctaataaaacttgtcttttaaggtccgggggacccaaccgtgaattaatttaggaccccctttccctttttaaagggaaaccaaaggggaaataaccctattgggttttaacccgggca

SEQ ID NO: 7539 - DNA, 1080 bp, Homo sapiens
  misc_feature (26)..(26): n is a, c, g, or t
  misc_feature (255)..(255): n is a, c, g, or t
  misc_feature (440)..(440): n is a, c, g, or t
actcagcagatggaaacgagccagangggtatggagtgggaaggtgttttcccctggagtcaggccgttagcagccagctctcctctgaccgccctcagccaaactccgcgttgtcctgccgttctgctgttggtggcctgccggagtctgtcactgtgttcttctgctggtaattcagaggtccgtggggccagccagcctgagcttgctcaccttcaaagtctatgcagcaccaaaaaagaactcacctcccnaaaaattccgtgaaggttgatgagctttcactctactcagttcctgagggtcaatcgaagtatgtggaggaggcaaggagccagcttgaagaaagcatctcacagctccgacactattgcgagccatacacaacctggtgtcaggaaacgtactcccaaactaagcccaagatgcaaagtttggntcaatgggggttagacagctatgactatctccaaaatgcacctcctggattttttccgagacttggtgttattggttttgctggccttattggactccttttggctagaggttcaaaaataaagaagctagtgtatccgcctggtttcatgggattagctgcctccctctattatccacaacaagccatcgtgtttgcccaggtcagtggggagagattatatgactggggtttacgaggatatatagtcatagaagatttgtggaaggagaactttcaaaagccaggaaatgtgaagaattcacctggaactaagtagaaaacttcatgctctgccatcttaatcagttataggtaaacattggaaactccatagaataaatcagtatttctacagaaaaatggcatagaagtcagtattgaatgtattaaattggctttcttcttcaggaaaaactagaccagacctctgttatcttctgtgaaatcatcctacaagcaaactaacctggaatcccttcacctagagataatgtacaagccttagaactcctcattctcatgttgctatttatgtacctaattaaaacccaagttaaaaaaaaaaaaaaaaaaaaaaaagatggaataaaaaaaaaaa

SEQ ID NO: 7540 - DNA, 3120 bp, Homo sapiens
agcggggtaggaggcaaccatgtggttccagctgaattttttttttccctctctctttcttcactcctttttctttccaaacagggaaaagtgttccacgaagcggtagcgcctttccgcctcgcgttttcctccctgaccctggtcccggctcccgtccgggcgccagctggtggggcgagcgccgggagcccatctgcccccaggggcacggggcgcggggccggctcccgcccggcacatggctgcagccacctcgcgcgcaccccgaggcgccgcgcccagctcgcccgaggtccgtcggaggcgcccggccgccccggagccaagcagcaactgagcggggaagcgcccgcgtccggggatcgggatgtccctcctccttctcctcttgctagtttcctactatgttggaaccttggggactcacactgagatcaagagagtggcagaggaaaaggtcactttgccctgccaccatcaactggggcttccagaaaaagacactctggatattgaatggctgctcaccgataatgaagggaaccaaaaagtggtgatcacttactccagtcgtcatgtctacaataacttgactgaggaacagaagggccgagtggcctttgcttccaatttcctggcaggagatgcctccttgcagattgaacctctgaagcccagtgatgagggccggtacacctgtaaggttaagaattcagggcgctacgtgtggagccatgtcatcttaaaagtcttagtgagaccatccaagcccaagtgtgagttggaaggagagctgacagaaggaagtgacctgactttgcagtgtgagtcatcctctggcacagagcccattgtgtattactggcagcgaatccgagagaaagagggagaggatgaacgtctgcctcccaaatctaggattgactacaaccaccctggacgagttctgctgcagaatcttaccatgtcctactctggactgtaccagtgcacagcaggcaacgaagctgggaaggaaagctgtgtggtgcgagtaactgtacagtatgtacaaagcatcggcatggttgcaggagcagtgacaggcatagtggctggagccctgctgattttcctcttggtgtggctgctaatccgaaggaaagacaaagaaagatatgaggaagaagagagacctaatgaaattcgagaagatgctgaagctccaaaagcccgtcttgtgaaacccagctcctcttcctcaggctctcggagctcacgctctggttcttcctccactcgctccacagcaaatagtgcctcacgcagccagcggacactgtcaactgacgcagcaccccagccagggctggccacccaggcatacagcctagtggggccagaggtgagaggttctgaaccaaagaaagtccaccatgctaatctgaccaaagcagaaaccacacccagcatgatccccagccagagcagagccttccaaacggtctgaattacaatggacttgactcccacgctttcctaggagtcagggtctttggactcttctcgtcattggagctcaagtcaccagccacacaaccagatgagaggtcatctaagtagcagtgagcattgcacggaacagattcagatgagcattttccttatacaataccaaacaagcaaaaggatgtaagctgattcatctgtaaaaaggcatcttattgtgcctttagaccagagtaagggaaagcaggagtccaaatctatttgttgaccaggacctgtggtgagaaggttggggaaaggtgaggtgaatatacctaaaacttttaatgtgggatattttgtatcagtgctttgattcacaattttcaagaggaaatgggatgctgtttgtaaattttctatgcatttctgcaaacttattggattattagttattcagacagtcaagcagaacccacagccttattacacctgtctacaccatgtactgagctaaccacttctaagaaactccaaaaaaggaaacatgtgtcttctattctgacttaacttcatttgtcataaggtttggatattaatttcaaggggagttgaaatagtgggagatggagaagagtgaatgagtttctcccactctatactaatctcactatttgtattgagcccaaaataactatgaaaggagacaaaaatttgtgacaaaggattgtgaagagctttccatcttcatgatgttatgaggattgttgacaaacattagaaatatataatggagcaattgtggatttcccctcaaatcagatgcctctaaggactttcctgctagatatttctggaaggagaaaatacaacatgtcatttatcaacgtccttagaaagaattcttctagagaaaaagggatctaggaatgctgaaagattacccaacataccattatagtctcttctttctgagaaaatgtgaaaccagaattgcaagactgggtggactagaaagggagattagatcagttttctcttaatatgtcaaggaaggtagccgggcatggtgccaggcacctgtaggaaaatccagcaggtggaggttgcagtgagccaagattatgccattgcactccagcctgggtgacaaagcaagactccatctcaaaaaaaaaaaaaaaaaagggaaggatacaaaggaagtctcagtatggtaccacaatttggcaacttcctccatttcttcaatttagaaggatatgaacctggaactttggatgattctaaggccttaactatcaaaaaaatcggaattgcaatgctcctaatgggacctgaaggtttatggccataaacccggtccctcctaatttctcacaaatcggtgttgtcccccttgtgcaacaaccaacattcttggtaaggccccaggattatgctggggtaaagttcacctaggatattgtgccctaaaaggtggaagggacatcaatcaacccgctcattgtacagagggaaacaatgacaataaggagcaaccaggcagtatatatcagaaagatataatacacgaaagcacaccgtcaccaaaacgcaagcaacgacagcaagacaaaacgtacaaagcttcatccatcacacctttct

SEQ ID NO: 7541 - DNA, 3521 bp, Homo sapiens
aaaaaacaaacagaggcagaggcaggcagtagcagaaagcagagcgtaacatcagctagatggtaacatgcaatgtcagctctcttgaagacatgggaaacctaagttacaccttgggttaaaattcttcaccgtattagttttgttgcttcataaaatttacctaagcaagtggtcttgcttgcctcaaatccaagcagtcttgaacacttggaggcaattaatgagtatatcttagtcaaaagaattgttggagctttttattaaagctgcagtttcagttctgcttttggggaattgtgctatgaaagcagctgccaaaataagctcatttattttcttcaatcccactcagtgctcagtcactatattctgtttcctttttttttttcaagttgcatatttggtttccccttatgattgggaaagatgaattttcagcagaaaacagtgtttgttcactttcaaagagtgatagtttctaaaacatttagagcaataaatattcatcagaggtaccaagtaagccagcagaagagttaagggttagagaaatcccttatttcatgtcttgactctaaaatgatcaaagtacttttccttgtaatgtggatttcttcttatgcggatatgcaaaaacttcagttatacgtagtaatgctagcaggtaattttagtggacattttataacaactgtcactttgttttgccacatgtagagtttgttcagctattttccagatatctccccacaaaaggaggcaaagggtaccagcttttcaatgagcattacctattacttggcaaagatgatgaagactctattaatagttcatttgataaatgttgacataaccaacaatagagattaggaagttagttttaagaaatcaatagcatatagacattaccctcatggagtttgtattctactacttgaactgattgtagctataaaagcatagttagatagctgaatagttagatcataagcaaagaaggccagaacacatctcttatcaagaaatcaatgaatagtttatctcatttttaaagcaactttatccttctttaattccttcctttcttctagtgcaaaactacttaataaggttggtgtttaggttagtgttcacaccattcctcatctggtgtgaattaccttctctttctttactatttactaccaacctagtacatgtgttgactgaattcttttcaaacaatgttgagttatcatggtgcacctaataaattaacaccacagattacagcatccttgctgattttctcagcaaagccagattagatggaaataaacaaagaaaatgatcctagagtgaatttttctagaaaatatctattatgaaccatgctgtttaaagtattagcttgaaggtgatggatccagctattcagaaaataactttcatataaccatgattttgcacagtatgaggtcttaaatgtgtggaaagagataaattttttatcattaccacaaaccccttttaaagattcaaaggtggaagaaagtgatttattttttctcttcagcatacatatataaaagacttgtcagatgtttaatttggggaggttgataatgaaacatatcaacagagtatagtagttatagtagtgtttgtgggtaaataatttcctggggtcagacatatataaacatatttgcttcaaaatgataaaggcatgaaatcagtcttaaaaattgaaatgggggtgatgggggagaaaaagaagaacaaatttgaagtgccctttcaaatctgctggatacaagtattgaagttttaagtcatcttattctgtctgaaagtgtatttttcattctacaatagacccaatcaacaagacgtataacttgagttgcatgatgttcagtttatgtaatctactgttgggatggtaagaattgatgtaggctgtggtgtaagaatgaattaaaatatagtttcactggcttttctctacatatccactatcacaatggctaggtttcctgttgctcactgttggattctggagaaaaatttaatgaaagatgatatcagaggaagaataagtggaggtagagaagaagggagtgatagaggaggggaaaaaaacaaaacatatttttgtgttatccaaaggagctttttccttattctgtcaagcattgagatcttcttcagctttcaatgtagttgctaaatacaaataatgctactaggtagtgactaaatatagcaaacacttcatcagatattagaattaggtcacactattgaggttataatctgaaggttgtgttacatagaaaccactttagattattatcaacttggactaggctttattttataatagcatagtaagtaatatctattgtgtcatttcttcaaccattttattctaagatccatgaagcttcttgaggccaaataaaataataagtttagacaagaagtagattgtgactttttttcccttagagatactatttactatctcctatcctgataggtggaaggtttactgaattggaaattggttgactattagtttttaactaaaatgtgcaataacacattgcagtttcctcaaactagtttcctatgatcattaaactcattctcagggttaagaaaggaatgtaaatttctgcctcaatttgtacttcatcaataagtttttgaagagtgcagatttttagtcaggtcttaaaaataaactcacaaatctggatgcatttctaaattctgcaaatgtttcctggggtgacttaacaaggaataatcccacaatatacctagctacctaatacatggagctggggctcaacccactgtttttaaggatttgcgcttacttgtggctgaggaaaaataagtagttcgaggaagtagtttttaaatgtgagcttatagatagaaacagaatatcaacttaattatgaaattgttagaacctgttctcttgtatctgaatctgattgcaattactattgtactgatagactccagccattgcaagtctcagatatcttagctgtgtagtgattcttgaaattctttttaagaaaaattgagtagaaagaaataaaccctttgtaaatgaggcttggcttttgtgaaagatcatccgcaggctatgttaaaaggattttagctcactaaaagtgtaataatggaaatgtggaaaatatcgtaggtaaaggaaactacctcatgctctgaaggttttgtagaagcacaattaaacatctaaaatggctttgttacaccagagccatctggtgtgaagaactctatatttgtatgttgagagggcatggaataattgtattttgctggcaatagacacattctttattatttgcagattcctcatcaaatctgtaattatgcacagtttctgttatcaataaaacaaaagaatcctgtaaaaaaaaaaaaaaaaaaaaaaaaaaaaaatatgggggagaaaaaaaggggggggaagaatattaaagaggaga

SEQ ID NO: 7542 - DNA, 1720 bp, Homo sapiens
  misc_feature (134)..(134): n is a, c, g, or t
tcgttcttcgctgttcgcgtcttctctatctgtttgttgcttcttctttttctgttgtgtgcttggttgcgccctctctgtgctcgtagtcgctcgtgctgtcgtcgtgcgctctcttcctctcccggcgcggngtgtttatcgactcgggggccctggttgtgaggaccagttagcccgagcatccattgtgattgttccaaaacccgggtgtccccgcgcgcgttttttattgggtggggaaaagcacaagcacatcttctagacccgggtttgctcttggggcagacgttgcccagttttgcatacattgtgggcccggcgcccaaagaggggtttaaaaacttttctgggcgagggcccctatttttttttttcacaatgtgttaagtcagttgttttattaaaaaataagcactatgcttgggtttcataaaatttatacatgaatatgtacacagacacaaataaaataatattaaaaataaaaatcacacttgctttcaaggcagtggtcctggcaccccacatacataatcaacttttcctttaaagaaattgcttggcccaaggagaccacagttagagaaccactaataaagctgtagcccgttgcctgcaacattttcaattcgggtttcaaaaatatataaataatttaattacaaaacccaacattttttttctcttttggcacagtgaagcatcggtcaatagcaagaaatcactgaagagcctctgacatgtctctcacactcagtcatacctggaaatgccacatacgtacacggatgggggcccagaaaccccaaacagtagtcatatcatttatagtgtggaaaggttccctgatgtacttaggggggagggaagggacataaatcaatggaagttgcgacaaaaacagtagaaataagacgaagcctgggcgttaaagaaagacaaaaaaagtccttatgaagggaaggaggagcaggcttcgcaaagaaactaaaacaagaattgctttggtcctctgtaaagttataaaacacaaaggaaaatatcctggactaagtttaaatactcctgtcaaaatgctttagctttaaggcacgtttgatggagattttaaaaattcatcttcctctggattcaaagtgcaaagtcccgcgcgcgggccccgcgtatcccgcctccccgagggcgcgcactcggcggttcccggcgccccgcgggggatactccagggtaaggagcgtcctcccccggggtaaggggacgatgcgggcccacggccgggcgacttggtcccccttcaaaaagggtttccctgccttgcttgcctggagcccctttggaaatcattccccccctcccccctccctcgagtttttaactggcccccccagtaaacccctgagatgtgacaccctgtgtaactccaccacatgcaatataaagcgcccccggtgttagcgtgaagtcacgctatctgattatgtgtgcaccactatttgcccgcgcgcctcccccttctcaacccccactggtttgtttgtcccccaaggtacacccccgccgtggtaaacccctcccgccccagccctaggaggcctcacgcatacccctcccctatgtctagtatagaacaaaaatctaccccgccgccccccccccgctattgtatcctttcgtatgttgtgtttgtaagtacacattccaacccgatcacacgtcc

SEQ ID NO: 7543 - DNA, 3536 bp, Homo sapiens
  misc_feature (3528)..(3528): n is a, c, g, or t
agcggagtgcgcaggcgcgcgctgggcgccaacctcggcttcttgccgctaacggcatcgagtctggacgccccgtgacccgcctgggccggagcgagggcggacggcgccttcttggccctttctgcctctagcagcggcgccggggtagccggagccagcgactgggaaacggctgcattccactgcgtctccttggcctggctgggcggtcggaggctggtctgccaagattactgtttggagaccgctgcagcccacgtccacctgatagactatttactacacatagtagattcagagccgctaaatgtccaagaccatggcgatgaaccttctggaggattggtgcaggggaatggaagtggatatccaccaggtctttgttggtcacaggcatcccagaggactgtgggcaggcagaaattgaggagaccttgaatggggtcctctccccactgggcccgtaccgcgtgctcaacaagatttttgtgagggaagagaatgttaaagctgccctcattgaggttggtgaaggtgtgaatctgagcaccatcccccgtgaattcccaggaaggggtggtgtctggagagtggtctgtagagaccctacccaggatgccgagtttttaaaaaatctgaatgaattcctggatgccgaggggcgcacctgggaggatgtggtccgcctgctccagctcaaccaccccaccctgtcccagaaccagcatcagcccccagagaactgggcagaagctctgggggtgcttctgggagcagtggtgcagatcatcttctgcatggatgccgagatccgcagccgggaggaagccagggcccaggaggccgctgaattcgaggagatggcaggctgggcctttacagcagggaggaaggtgaagaaagaaccggggcttgcagcagaggtgggttctgccttaaaggcagagacccccaacaactggaatgccacggaagaccagcatgagcctaccaaacctttggttcgcagggctggagctaagtctcgctccaggagaaagaagcagaagaagaactccaggcaggaagcagtgccctggaaaaaacccaaaggcatcaattccaacagcacagctaacttggaggatcctgaggtgggtgatgctgaaagcatggcgatctcagagccgatcaagggcagcagaaagccctgtgtgaataaggaggagttggctttgaagaagcccatggcgaaatgtgcctggaagggtcccagagagccacctcaggatgcccgggcagaagccgagagcccaggaggcgcctctgagtcagaccaagatggtggccatgaaagcccaccaaagaagaaggccgtggcctgggtgtctgccaagaaccccgctcccatgaggaagaagaagaagaatccagaaaggtttgatctgggggaccacccatactgaggagttgaaagaacaaggaagaagtaccaagtcaaccaagttctctcttgtcactgaataagactttggactctcttagggcccctgttgatagagatctggccctgaggtaaacgataggtgaggtcttgggtgggagggagttggggaagggaggtggatctctatgcccttttctctaccaggcctgccgtttcaccgccttctctactcaccttctcttcggaggcaggagagttggtaagaggattgggaaaattctagaacattcattcccctttatgcatgagcagggtcactgttacactcatccatgttcagcttttctcccccacgccttgctccctcctcggaatggtcagcgacctctgcaggccctggcatttggaagagctgggtggccctgccatattcttcctcccgccttcctcttgtgtaaccagcggggtaagttaagccaggaccttcgctgcaaacctggttttattgctccttcagtctccagcttccatcctccagttatctagccaggaggtcccaagagttagggaaaaagaatgtctgcctagacctcaaagtctttgagttttagagtctgttagtaaaaatggcactttgattcccatttgggatgagccctctcaggaatcctgtggggaaggggggtgattatagggaaggacgcaggcattcctaggtccccagctctaattccatccatctacccaactgtcaccatctttgcaccaaactgtcaccatctttgcagcagaaggtcactactcacattatagtaagaggggaaaaaaatcttttaaaacttggctgttggccgggcacggtggctcacgcctgtaatcccagcactttgggaggctgaggcaggtcgatcacgaggtcaggcgtttaagaccagcttgaccaacatggtgaaaccccatctctacaaaaattagctgggcgtggtggcgcgcgcctgtaatcccagctactcaggaggctgaggcagatgaattgcttgaatccaggaggcagaggttgcaatgagccaagattgtgccacggcactccagcctgggcagcagagtgagactctctctcaaaaaaacaaaacttggctgttaatgtctgccctctgaattcagacacactatattagaccagaccaccatgtgtcattgtgtgtgtgtgtgtgtgtgtgtgtgtttgcgtgcgcatgtgtagaggagagagcagggtccctgagataatggtttccaaactgtatcgtagccgtccacaaagatgtaatccaaatctatttttctcacgtgtttaaaaaactgaaaagtgactactcagatatgttggaagtcacatcgaagactatcagaatattaccttgtgttcataggttaacttgtttttgtacacgtcttagttatttcaggcatctctttgcttaaaattgagtttcttgtaaatgtgactgatgagcgaggttagaagtggaagaaattcctgtgcatgttctataatctgacaccctgaaagcaagtttcctttcgtcattcacatgctcttgttctgccgtgactgttcaggtgtatggtagtaagtaaatgtattaacatggtgaacagtagtaatattctatcatagagtattagcccttgcaagttttcagggcgtcttttccgacttcagtttttgtgataaagaatgtgaacagttgttagatgttctcagtgattcaactttaaaacaaatttctcgtgatgattcatttcaaaatcctgagtgagtctgactgaaaaatacgagagaaaagagagtggtttccgtttgcagctacacagctgtgtgcatcgacgttctcctggggtgtgtgccaagcgaaacccaggggtgaattggattcttgaagagaccaaagcctgtaactgtccagcttctaatttcaaaacgggtccattagggcttcgttgtgttaacaagttgacaccatgactagtaaatgtaaacgtgtatgtataaaataaagtttagcaaattaagtgtcctgttaaaaaaaaaaaaaaggatgtatgtcggaaaaaanaaaaaaag

SEQ ID NO: 7544 - DNA, 4692 bp, Homo sapiens
ccccgccccgctctttcgcttcccgggccgccggcagccgccgccagccgcagccatgggccgggcccggccgggccaacgcgggccgcccagccccggccccgccgcgcagcctcccgcgccaccgcgccgccgcgcccgttccctggcgctgctcggagccctgctggccgccgccgctgccgccgccgtccgggtctgcgcccgccacgccgaggcccaggcggccgcgcggcaggaactggcgctgaagaccctggggacagatggcctttttctcttttcctccttggacactgacggggatatgtacatcagccctgaggagttcaaacccattgctgagaagctaacagggtcttgttctgtcacccagactggagtgcagtggtgcagtcacagctcactgcagcctcaacttccctggctcaattgatccccattgctgagaagctaacagggtcaactcccgcggccagctacgaggaggaggagttgccccctgaccctagcgaggagacgctcaccatagaagcccgattccagcctctgctcccggagaccatgaccaagagcaaagatggcttcctaggggtctcccgcctcgccctgtccggcctccgaaactggacagccgccgcctcaccaagtgcagtgtttgccacccgccacttccagcccttccttcccccgccaggccaggagctgggtgagccctggtggatcatccccagtgagctgagcatgttcactggctacctgtccaacaaccgcttctatccaccgccgcccaagagcaaggaggtcatcatccaccggctcctgagcatgttccaccctcggccctttgtgaagacccgctttgcccctcagggagctgtggcctgcctgactgccatcagcgacttctactacactgtgatgttccggatccatgccgagttccagctcagtgagccgcccgacttccccttttggttctcccctgctcagttcaccggccacatcatcctctccaaagacgccacccacgtccgcgacttccggctcttcgtgcccaaccacaggtctctgaatgtggacatggagtggctttacggggccagtgaaagcagcaacatggaggtggacatcggctacataccccagatggagctggaggccacgggcccctctgtgccctccgtgatcctggatgaggatggcagcatgatcgacagccacctgccttcaggggagcccctgcagtttgtgtttgaggagatcaagtggcagcaggagctgagctgggaggaggctgcccggcgcctggaggtggccatgtaccccttcaagaaggtctcctacttgccgttcactgaggccttcgaccgagccaaggctgagaacaagctggtgcactcaatcctgctgtggggggccctggatgaccagtcctgctgaggttcagggcggactctccgggagactgtcctggaaagttcgcccatcctcaccctgctcaacgagagcttcatcagcacctggtccctggtgaaggagctggaggaactgcagaacaaacaggagaactcgtcccaccagaagctggctggcctgcacctggagaagtacagcttccccgtggagatgatgatctgcctgcccaatggcaccgtggtccatcacatcaatgccaactacttcttggacatcacctccgtgaagcccgaggaaatcgagagcaatctcttcagcttctcatccacctttgaagacccgtccacggccacctacatgcagttcctgaaggagggactccggcgtggcctgcccctcctccagccctagagtgcctggacgggatctgatgcacaggcccccacgcctcagagccagagtggtcctcagcccatttcagactgcagatgccgcccactcccaccccactcctaggctgccttggagggtacaagatccactgagggtggccaccacagccttggctccatggtggcgggtagacaagggatgcctgggctgactgggcagaggaacctctagctctgactgtcactcggctctccctacccatttggctctggaagctgcttggcccccccagatcagggcctgggtgaactccctggacctttcctagccagccgcacagtctaggcccttgtggggtgaagaatggagggaggagcaggctaggaagacggggccaccaccctctccttgctttcagcccttcccacaggaaacatcaagaagccccagccaggaggggccaggctgccaaggcggctcccctgtttatctagagccttcgttcctggccataccccggactgccctcctgtgcctgatgtccccagctggggtcagtctcaacaggagccagtcttctggagcctctgggcagaaccctccatcagagtggaaatcagacgggaccccctgcagcttccctgaccacgccactgaccagctatctggggaagtttactgtgaaggggtttctgcctttagcaatggggttcactaagggggttcccgaggcccagggccaaggcactcccaccgcctaccttagcacagggtctctgcaggactgcgggagccagcgctcctgccgcccctcttgcccctcagaccttgcatccacagaagcacaacccagccaaacaccacagccttctccagagccggcactgtcccggcaaccaggggtgccccaggctagctcttctacctctggggcaccacggactccccttggccactcttgggactttggtccacgtcctgagccactgaccacggccagtctctctttttatatgtgcagaaaagtgtttttacacaaactttctcatggtttgtaggtatttttttataaccccagtgctgaggagaaaggaggggcagtggcttccccggcagcagccccatgatggctgaatccgaaatcctcgatgggtccagcttgatgtctttgcagctgcacctatgggaagaagtagtcctctcttccttctcctcttcagctttttaaaaacagtcctcagaggatccatgatccccagcactgtcccatcctccacaaaggcccacaggcatgcctgtactctctttcattaaggtcttgaagtcaggctgccccctccccagcccccagttctctccccaccccctcaccccacccggggctcactcagcctggcagaggaagaaggaaggcagacatctccgcagccactcctgggccttttatgtgccgagttaccccacttgccttgggcgtgtccactgagccttccccagccagtcttgttctcaattttgttttgttttgttttgttttgagacggagtcttgctctgtcacccaggctggagtgctatggctcgatcttggctcactgcaacctccacctcccaggttcaagcaattctcttgccccagcctcccgagtagctgggattacaggtgcatgccaccatggctggctaatttttgtatttttagtagagatggggtttcaccatattggtcaggctgatctggaactcctgacctcaggtgatccacctgcctcagcctcccaaagtgctgggattacaggcgtgagcaatcgtgcccagccttgttcttaattttgtatcatccagtcatcgctaatattacacgcaccttctcacttaatcctcacgacaagcctgtgaggcagatgctcattgttcccatcttgatgaaacttgagtctcagggaagtgaagtgacttgcccagggtcactcaggtagagttgagattcaaacccacatgtggctccaaagtctgcatctggatttgggggtgttttttggcatggcaccctcacctctctccctgcctgttttccccaaagtggaaaggaaggcctttcaaaccagagtgtctcactcccctctgacctccagaccagatggggcatgagccagccagctcagccaggctccctgtgtcctgggaggaagtgtccccatcccccatgccccttatggggagggagggcgtctgatgctctctctctgcctcccccccatcctgtcaggcacaggtgacgggggcagcccatgcgagcccttctcctgctgctctgggagggccagttccacattgagccagcctggtcccatggaaaatgatggcctgggctttctgaggccttatctgatgcctctgcagttcatgtcccccaccaggcctcgaggctcagggtgggagagggccccgggctgccctgtcactcctctaacacttccctcccctgtccccaacatgccctgtaataaaattagagaagactaaaaaaaaaaaaaaaaaaaaaaaaaaaaaaaaaaaaaaaaaaaaaaaaacgaacaacaaaaaaaaaaaagaaaaaaagtaaaaccaacaagaaccagcgcaagagcaccaacagtgacgctcaccagaaaggcgatcagaatggaccaggagagaacagtgattagtcgatgggatgatcgcagcgcaagcatggcgacgagatgaatcagacacgcgaccgtcccggccgtctgtgcgagtggaggcgcgctggcttccgtagtcagtgagtgcagttggtagccatgcgttgcgtcgagtggagcaggctaagactagggaagccgagaggtcagcagtaggttggacacgaaca

SEQ ID NO: 7545 - DNA, 1156 bp, Homo sapiens
  misc_feature (8)..(9): n is a, c, g, or t
tcaatttnncagagtctattgactgtaatctgctgcttatatgtacctgtgcttatattcgatccttggcacccagcctcctggacagaaataaaactggatttgttgggtatattttggaagtgtgccagaattggtggacggaagagtcccttatgtgtgcagtatgctgtaataattaatggccttcaggcattcctcttcataccagtagctgggagaaaatgccaagaatgtagtgcgcatacagatttgagttgtgaagcaaggactgactgcagataattaatggaaagggatgtttagactctgtttatctccgaacatttgaatgagaataagatttgtccagatggctgttctctaagttgttaatgttatgtggagccaatggttctgttatagaacgattaagagtgtgaaccagtgttgatagtgcgtgtagacgatcaacctcagtgacttgtcagctacaatattacattctgcaaatgttattctgttgtatcagatacgaaagttttagtgaggtatctctaaggcacatagtagaaaacaaaattggttaattactcaagttcctttcactgtgatttggaaatgatttaatctttatagaatgagaaccttttttggactagcttttttattaaaatggctcaatttgtgttgataaggattgcattaatatttaatagtgcttgcttttcctctgggcacaccattttgatcattaaccagagtacctctactcttagcaaactctagtttatgacaagtatttaaaatatttaaaacaagcttatgcagttcttaaggacgaaggtaaatgagatgtaacttaaaaatagtattgggaaaatgttgatagttaacattagtggatttagactagccaaatgacatagtaggctctgaaacatcttgtcaagtatatgtattttgtgcatgaatttttgctggaaagctgtctttctctgaaaaacacaacgttcttagaatgaaaagaacaatttaaataaaattaactttaatcccttaaataaacaaaaacaaaataccaacccatataaaccatataacatacaccccacaacacaaacacacaagtccaaaaaataaaaaaaacagtaaacttaaatacaaacacgcaaac

SEQ ID NO: 7546 - DNA, 1019 bp, Homo sapiens
ttttttttttttttttttttttttttaatgaaaaaacaactttattcacagaggctgagagtttgggatagcaaaatatccagtgacagccctttcgctacattttcagtgaatcacagtgagcctggatctcagcaatggctcctcctggaagttcttccaatcaaggctggcctgaagtttcccagagtcttcccactggcctgggtagaacccagtcgtggaagcctggttcagcatggataggagaatgaattttccaaaagtcacctctatgcctgtgaattatccaattactctgccggcctgaaatgtcctttccaacacattgaccaacaggccctctggattcaaagtttgtcatcatttttagacaagtcctggaaactattttaaaagcgatcttaaagacctccctcccaacctatttccaatagtgcgtgactacttgtgtctttatcacatgacataaaataaaagtgacttagaggttcagaaaattgcatttcagggcctcgaagattacccagctagagatggcatagaggtcggttgcatttccccggaagctgcaagctgaacttggttgtgaacatctcaatgttcttaattagattttcgttgcagacctcttctcccctccccagactgccagtcacctctttaaggttttgatttagtatcagcctccaggcctgcctggcagggctgggagggaagagcgggcggctgcagggggtgcgggggccaggagtgtctgggagattcctgccatcaaacctcaggtcctctggggcccagagaggccccttccagcggacaccagcacgtccccttattcttcccccgcattcatccctctctctctctgcatctgcttttggttgttttacccaactttttaaattaaatgtagtctttcattatctgtttctgaaaaatatagcgaccaccaagcctggatcttgaaaaaacatggaaatcaaaactctgacattgtccaaggcatatccccttcc

SEQ ID NO: 7547 - DNA, 6718 bp, Homo sapiens
  misc_feature (928)..(968): n is a, c, g, or t
  misc_feature (3266)..(3266): n is a, c, g, or t
  misc_feature (3292)..(3304): n is a, c, g, or t
  misc_feature (4555)..(4572): n is a, c, g, or t
gggggatcccgggggccagtcgcggccgggacatcgggcgctgcggccggggacccgctgctgagatagacagaatatggcagagctttctgagccagagggaccagtagattggaaggaacgatgtgtagctctggagttccaactcatgaaatttagagttcaagcaagcaagatacgagagcttttagcagagaaggactgcttgagggttctcacaacatggtggctggcttcccccagagcaagtcatccaagagaatgcaaggtggaagatgcagtgcgtcttatgacctactctcagaagtcatacttcatcatttccacaatatcctgttggttgcaaaggtcagccctatgttgtgaaggaagcaactacacatgggtgtgattaccagaagatgcaacagcttgagagacaagttattgatgctgaacgtcaagcagaaaaagcttttcaacaggtacaagttatggaagataaattaaaagcagctaatattcaaaccagtgaatcagagacaagattatataataagtgtcaagatctggagtcgctaatacaggaaaaagatgacgtcattcaaaacttggaattgcaacttgaagagcagaaacaaataagaatacaagaagctaaaataatagaagagaaagcagctaagataaaagaatgggtaacagttaagttaaatgagctggaattggagaatcagaatcttcgtttgatcaaccaaaaccaaactgaagagataagaacaatgcagtcaaaactacaagaagttcaaggaaagaagtcatccactgtctctacactaaagctttcggaaggccagcgcctgagcagtttgacctttgggtgctttttatctcgagcaaggagtcctcctcaagtagtaaaatctgaggaaatgagcaagatatcatnnnnnnnnnnnnnnnnnnnnnnnnnnnnnnnnnnnnnnnnnatggaaattccagaaaagtctgttgataaccaagttctagaaaacaacagaggccagagaacattgcatcaaaccccttgtggctcagaacagaatcggaaaacaagaacaagctttgccacagatggtggcatctcccagaattctggggctcctgtgagtgactggagctctgatgaggaagacgggagcaaaggaagatccaagtccagatgcacatccaccctctccagtcacacatctgaggaaggggtccagagtagcaggatgggaagtgaaatgtatctgacagcatctgatgacagcagctctatatttgaggaagagacttttggcataaagagaccagaacacaagaagctatattcttggcagcaggaggcacagtggaaagctctaaatagtcctcttggaaagggaaattctgaattaagtaaaaaggaacaagatagttcctcggatgaactgaataaaaaatttcaatcccagagactcgattattcatcttcatcgagtgaagccaacaccccaagccctattttgaccccagctttaatgccaaagcatcctaactcactctctggaaaaggaacacaattagtgccttcatcacacctgccacccccaaagttaaggattcctaatgttttcagtataagtgtagcactagccaaaaggcacttaagccagccacagttaagctctgacaggatgtttggtacaaatagaaacgctataagcatgatacgaccactgagacctcaggaaactgatcttgatctagttgatggagacagtacagaagttttagagaatatggacacgagttgtgatgatggattattttcctatgactccttggactctccaaattcagatgaccaggaacactgtgactcagcaaagaaggtggcatacagcaaacctccaactcctcccctgcaccgttttccttcttgggaaagcagaatttatgctgtagccaaatcaggtattcgaatgtctgaggccttcaatatggagagtgttaataaaaattctgctgcaaccctttcctatactacatcaggactttatacatctctgatatacaagaacatgaccaccccagtgtatacaactttgaaggggaaggcgacccaaataagtagcagccctttcctggatgactcatctgggtcagaggaagaagacagctccagatccagctcccggacgtcagagtcagactcacgcagtaggagtgggccaggcagccccagagccatgaaacgaggtgtgtctctctcctctgtggcttctgaaagtgattatgctattcctcctgatgcttactccacagacacggagtactcacagccagagcagaagctcccaaaaacttgctcatcttccagtgataatgggaaaaatgaaccactggaaaaatctggttatttattaaaaatgagtggtaaagtcaagtcttggaagcggcggtggtttgttcttaaaggtggtgaattactttactacaaatctccgagtgatgtaattagaaaaccccagggccatattgaacttagtgcatcctgtagtattttaagaggagataacaaacaaacagttcaggtacttaactttttttttttttttttttttttttgtatcatgccagactcaattctcaattatccaacctaatggaaaggagataggataattcagtgtttctttattcactttggggggttagtttgatgccttggaagtatgtgaaactccacgaatttttggttaaaactataatgtaagttaggtgtgtgttgagtaactcccaccacactttacctttcttcctttatactcttctttcctcatatttaatctcctaggtattttcagctgtccaactgtgaagctattttaaggaagggttatctggtaaatgaattctcaataagatgttagttatataatgtactgtgaaattcaggaatgtttgtattttaatatagaatctgaaaatgacagttcttatatgaacttcagatgccataacaccaaagtgggaaatatattggtgagcagagggagtgtgctgccaagcaagtcacactgtaggggcagctgctgcccattttactcacacataagaccagtcttgccagaaatctgttaaatttaaaacacaggctgttgagatattctagtatatgtaatttaaagtcagacactttatttctgaaatgtcttcaataaccattattttcttatattgctcctttggagggtggaggacaactttgccagaaaggnacattatcaatgttccagtgatttgnnnnnnnnnnnnnctctcaaaaatttagaaaggagaatcaaggaaagctttgtctttgggcatggcagttaagaatcatttgtaagtttctgaaatttggaaaatttgcagtgtggctaatttgagactggaacattctgagttcataatatctaatcacatgttcgttccaataatttatcttcttatatgcaagatcttcttattttatttatagttgattttgtcatttgtattaagaaacctcttctttagttgctaaaactatgctattttattatagtctttaatcattctgctcctcatttcaataagtaggaacctggccgggcgcggtggctcacgcctgtaatctcagcacttcaggaggctgaggcaggcggatcatgaggtcaggagatcgagaccatcctggctaacacggtgaaaccccgtctctactaaaaattcaaaaaaaattatctgggcatggtggcaggtgcctgtaagtcccagctgctcgggaggccgaggcaggagaatggtgtgaacccaggaggcggagcttgcagtgagccaagatggcaccactgcactccagcctgggcgacagaaagagactctgtctcaaaaaaaaaaaaaaaaagaaaagtaggaacctgtaacacatttaagcaagaaagggaaaatgtgacaaataaacaagatataaaatcataaccccaaaattaggtaaactggagtaacaaagttatttccacaaaaatttaattgctgtaattctcacaaagtggttaaaatattctaactgatatggagtcatttatttagaaactgggacttgagatttagcatgtttgcttctgtgttaagtaatgacgtttgaataatgaacaaggaaatgctaacaatcctaaatcttcacagttttctttcctatacctttctcgttgcattctagttgaccactgaaaaacacacatactatctgactgcagattctcccaatatattggaagagtggattaaagtgttacagaatgttcttcgagtacaagctgccaacccactttccctgcagcctgagggcaaacccaccatgaagggattgctcactaaggtaaaacatggatattccaagagagtctggtgtacactaataggaaagacattatattattttcggagtcaagaagataagtttcctttaggtcagatcaaactctgggaggctaaagtggaaggggttgacagatcttgtgattcagatgaagattatgaagcnnnnnnnnnnnnnnnnnnatccacacattatactatcgttatccatcccaaagaccaaggtccaacttacctcctaattggatccaagcatgaaaaggacacttggctttatcatctgactgttgcagctggaagcaacaatgtaaacgttggatctgaatttgaacaactggtttgcaaattgctaaatatagacggggagccttcctctcagatatggagacaccccactttgtgtcacagtaaagaaggaatcatttcccctctgacaactctaccttccgaagccctgcagacagaagctattaaattatttaagacctgccagctttttataaatgctgcagttgactctcctgcaattgattaccacatatctttagcccagagtgctttgcaaatctgcctgacacatcctgagctgcagaatgaaatttgctgtcagcttattaaacagacaagacgaagacagccacagaatcaaccaggaccattgcagggctggcagctcttggcactctgcgttgggctcttccttccccatcatcctttcctgtggctcctcaggcttcacctaaagaggaatgcagattccaggtgtgcagaatactagccagctgaactgtttatgtggcctctgaaagtctacgataaatcataagtatttaacgatctgccaggacagaatttggaaaatatgccatttactgccagcgttgtgtagaaagaacgcaacaaaatggtgacagagaagcaagaccctcaaggatggaaattctttcaactcttctccgaaacccttatcaccattctttgccctttagtatacctgtgcacttcatgaatgggatataccaggtagttggttttgacgcatctaccacagtggaagaatttttgaatactttgaaccaggacacaggaatgaggaaaccagcgcagtctggatttgcgttgttcactgacgatccttctggcagagatttagagcattgtcttcaaggaaacatcaagatttgtgacattatttccaaatgggaacaggcttccaaagaacagcagcctggaaaatgtgaaggtacaaggactgttcgtctgacatacaaaaacagactatatttctcagtgcaagctcgtggagagactgatagagaaaagttgctgttaatgtatcagacaaatgatcaaatcataaatggactttttcctctgaacaaagatctggcattagaaatggcagctcttttatctcaggtagagattggagattttgaaagacctttctcaactccagcagggcatgttaccaatcagtgcaaagtgaatcaaaccctaaagcaagtcatagagaaattttatcctaaaaggtatagagatggctgttctgaagagcagttaaggcagctttgccagcgactttcaaccagatggatggccctccggggacacagtgctgctgactgtgtgcgcatttatttgacagtagccaggaagtggccattctttggtgccaagttgtttcttgcaaaacccataactccatcatcacttggaagtactttcttgtggctggctgtacatgaggatggtttaagcctcttagaatacaactccatgaggttaatagtcagctatgtgtacaagagtctaatgacctttggaggctatcaagatgattttatggtagtcattaacaatacacattcaaaggacaaaccaacagagaaattactttttgccatggcaaaacccaagattcttgaaatcactcttttgatcgccagttacataaacaacttccatcagcaaaaggcagcatttcaccacctctctgctccagcactgctctcagcccagacccggggaccccaagccagaatgatgggaagccagcctcttctgtcaagcagcagaccgaccaaaggccccaccttactctgaaagctggggagcctgaacattcactccttgtcctccatgctgtggctgtatcagctccctacaagttcgtttacacctggcagcacggcagccacacaccggtattccaaaccttaacaatgaagggggttagtctcttttatttgattcttaaatattcaaataaatattaacagtaaaacatagaaaaaaaaaaaaaaaaaaaaaaaaaattggcggccgc

SEQ ID NO: 7548 - DNA, 2407 bp, Homo sapiens
agctggtaagtcctcaagctggcaggtggtcgggggagcggccggagagtgccgctccgccgaccgaagaggctggacatgacaccagtggcatatcacggccatgttgtctcagcattccgctgctgctcgcccctcctcctgcaggcgaaagcaagaagatgacagggacggtttgctggctgaacgagagcaggaagaagccattgctcagttcccatatgtggaattcaccgggagagatagcatcacctgtctcacgtgccaggggacaggctacattccaacagagcaagtaaatgagttggtggctttgatcccacacagtgatcagagattgcgccctcagcgaactaagcaatatgtcctcctgtccatcctgctttgtctcctggcatctggtttggtggttttcttcctgtttccgcattcagtccttgtggatgatgacggcatcaaagtggtgaaagtcacatttaataagcaagactcccttgtaattctcaccatcatggccaccctgaaaatcaggaactccaacttctacacggtggcagtgaccagcctgtccagccagattcagtacatgaacacagtggtcagtacatatgtgactactaacgtctcccttattccacctcggagtgagcaactggtgaattttaccgggaaggccgagatgggaggaccgttttcctatgtgtacttcttctgcacggtacctgagatcctggtgcacaacatagtgatcttcatgcgaacttcagtgaagatttcatacattggcctcatgacccagagctccttggagacacatcactatgtggattgtggaggaaattccacagctatttaacaactgctattggttcttccacacagcgcctgtagaagagagcacagcatatgttcccaaggcctgagttctggacctacccccacgtggtgtaagcagaggaggaattggttcacttaactcccagcaaacatcctcctgccacttaggaggaaacacctccctatggtaccatttatgtttctcagaaccagcagaatcagtgcctagcctgtgcccagcaaatagttggcactcaataaagatttgcagaatttaatacagatcttttcagctgttcttagggcattataaatggaaatcataacgtggttctaggttatcaaaccatggagtgatgtggagctaggattgtgagtgacctgcaggccattatcagtgcctcatctgtgcagaagtggcagcagagagggaccatccaaatacctaagagaaaacagacctagtcaggatatgaatttgtttcagctgttcccaaaggcctgggagctttttgaaaagaaagaaaaaagtgtgttggcttttttttttttttagaaagttagaattgtttttaccaagagtctatgtggggcttgattcacccttcatccattggctggaacatggattggggatttgatagaaaaataaaccctgcttttgattcaaaaaaaaaaaaaaaaaaaacaataacagaactaaaaaaaaaacaaagggggcgcggcgccggcgttattaaaggtacattccccgtcagggggcgcccaaaagttattaacggcgtatccgccccgttttgcttgttgttacaaaggggtgctcccctatattgagcgacgttcggatttttatatacagcatcgggacgatggcccggttagtttacacaaacggttcgtgatctagggcacaacctggtgtatcgcggggaactttttggggaaaaagaacctataatattttggtgggggtggtgcatatatggtgggaacacatttcaccaaatgagagagttttaaagagcttcagaggggtaattttaacatttgtacagaggtggtgttggtgtgttgttaaaacggacgagacggcttagagcttgtgttgtatgaaaattggtggatgacgggggatattgtattctgtgaacatattttcttaagcggaattcgttagtgataatcagtggagggtagaaagagaagaaaaagaagaagaagataggatatagggcaggcggagggagaagagaaaaaaaagaaagaagaggacagagagacaggagaaggggcgagggcacggagagagcgaaccaaacgagaacagcgagagcagcccaaaagcgaagcaagaagaggagaaagacaagcaagaaggccggacgggagaacgagaggaccgaaagccacaggaggagaaggacgggaagagacgaggagtggagcgaggacggagaggagcgcgagagggagaggagaagagaggaaggtaggcagagagcggaggaaggcgagggggaagacgggcgggggcgctgaacaggggcgaggcgccaggggacgtcggcgc

SEQ ID NO: 7549 - DNA, 1454 bp, Homo sapiens
  misc_feature (493)..(507): n is a, c, g, or t
gcggcagcggcagcggcagcggcagcggcagcggcgctgagttttgtctcccgggccgtctgggcgcgcgcgggtgtcccaggtaccccgccgcctccctccttcccgcaggactcgtccctcctggccctgggccccaacgatgtcacgtccggcggcggtcggtcagcgcacagggcacggcttcctctgcttctcccaccacttagtctcaacccgggtgtgtttgcactactagagaatgaaatatgactgaggactctcagagaaactttcgttcagtatattatgagaaagtggggtttcgtggagttgaagaaaagaaatcattagaaattctcctaaaagatgaccgtctggatactgagaaactttgtacttttagtcagaggttccctctcccgtccatgtaccgtgcattggtatggaaggtgcttctaggaatcttgcctccacaccacgagtcccatgccaaggtgatgatgtatcgtannnnnnnnnnnnnnnatgtccttcatgccctgaaagtcgttcgctttgttagtgatgccacacctcaggctgaagtctatctccgcatgtatcagctggagtctgggaagttacctcgaagtccctcttttccactggagccagatgatgaagtgtttcttgccatagctaaagccatggaggaaatggtggaagatagtgtcgactgttactggatcacccgacgctttgtgaaccaattaaataccaagtaccgggattccttgccccagttgccaaaagcgtttgaacaatacttgaatctggaagatggcagactgctgactcatctgaggatgtgttccgcggcgcccaaacttccttatgatctctggttcaagaggtgctttgcgggatgtttgcctgaatccagtttacagagggtttgggataaagttgtgagtggatcctgtaagatcctagtttttgtagctgtcgaaattttattaacctttaaaataaaagttatggcactgaacagtgcagagaagataacaaagtttctggaaaatattccccaggacagctcagacgcgatcgtgagcaaggccattgacttgtggcacaaacactgtgggaccccggtccattcaagctgaacgcacccgctggttgtggaccgtctgccaggcaccacagtgagcattgtgttcttggcatgtgatctgggaaactgattgaataatacacttttcttgctttggtgctcaaagtggtttttttcccccaataaaattatttaattgaaaaaaaaaaaaaaaaaaaaaaaaaaaaaaaagagtatccccttcgagggggcccaaagcttaccgcgtaccccaaggctttctttggtacacaaagtgggtccccctaattagtggaagtcgcgtatttaataaagccctaaggcgcaacttgggccccgttccggttttttttac

SEQ ID NO: 7550 - DNA, 2214 bp, Homo sapiens
atttaccgccgcgcggagagtgagggcccaagtccgccctgctccgccacttaggccgccccagacgcttccctcggggctgccaccgggtcgggcgcggctgccgcggctcgcgggccttccccgcaccggcgcggcccaaccgccaccgaaccttctggaagcggcggctgcctgggcccccacgccgccagaatcgtacgcccgcgcgagctctctgcagccttggcggcctgggaggcggggctcggggtggggccggcgcgggggcggggtcggcgcggggaggccgcgttcgattcgcccccggcgcgcaggccccgcctcaccagccccatcgctccacctctgccctccccctttatggcgcggcccgggctcattcattccgcgccgggcctgccagacacctgcgcccttctgcagccgcccgccgcatccgccgccgcagcccccagcatgtcgggcccagacgtcgagacgccgtccgccatccagatctgccggatcatgcggccagatgatgccaacgtggccggcaatgtccacggggggaccatcctgaagatgatcgaggaggcaggcgccatcatcagcacccggcattgcaacagccagaacggggagcgctgtgtggccgccctggctcgtgtcgagcggccccgacttcctgtctcccatgtgcatcggtgaggtggcgcatgtcagcgcggagatcacctacacctccaagcactctgtggaggtgcaggtcaacgtgatgtccgaaaacatcctcacaggtgccaaaaagctgaccaataaggccaccctgtggtatgtgcccctgtcgctgaagcaatgtggacaaggtcctcgaggtgcctcctgttgtgtattcccggcaggagcaggaggaggagggccggaagcggtatgaagcccagaagctggagcgcatggagaccaagtggaggaacggggacatcgtccagccagtcctcaacccagagccgaacactgtcagctacagccagtccagcttgatccacctggtggggccttcagactgcaccctgcacggctttgtgcacggaggtgtgaccatgaagctcatggatgaggtcgccgggatcgtggctgcacgccactgcaagaccaacatcgtcacagcttccgtggacgccattaattttcatgacaagatcagaaaaggctgcgtcatcaccatctcgggacgcatgaccttcacgagcaataagtccatggagatcgaggtgttggtggacgccgaccctgttgtggacagctctcagaagcgctaccgggccgccagtgccttcttcacctacgtgtcgctgagccaggaaggcaggtcgctgcctgtgccccagctggtgcccgagaccgaggacgagaagaagcgctttgaggaaggcaaagggcggtacctgcagatgaaggcgaagcgacagggccacgcggagcctcagccctagactccctcctcctgccactggtgcctcgagtagccatggcaacgggcccagtgtccagtcacttagaagttccccccttggccaaaaacccaattcacattgagagctggtgttgtctgaagttttcgtatcacagtgttaacctgtactctctcctgcaaacctacacaccaaagctttatttatatcattccagtatcaatgctacacagtgttgtcccgagcgccgggaggcgttgggcagaaaccctcgggaatgcttccgagcacgctgtagggtatgggaagaacccagcaccactaataaagctgctgcttggctggaaaaaaaaaaaaaaaaaaaaaaaaaaaaaaaaaaaaaaaaaaaaaaaaaaaaaaaaaaaaaaaaaaaaaaaaaaaaaaaaaaaaaaaaaaaaaagtatcccctcgagggggcccaagtttacgcggtaccccagttttctttgatacaagggggcccctaataggggagccggaattataacctaggcccctggccgttcctttttacaacgtccgggaacggggaaaactgcctaactttggggattttttgggaagggaacctttactttcgtgggggggggacaataattgggaaaaccttccctaacggaaattttaaagcctcctagggaaaattataaaattttttaaggggtataaagggggtaaacataaccggccatatgccttgggcggctttgaaaatttt

SEQ ID NO: 7551 - DNA, 3098 bp, Homo sapiens
  misc_feature (3012)..(3031): n is a, c, g, or t
tttttttttttttttccccttgagcataaatgttttattgtcacctcagggctctcaggcaggtggggctgttgcatgccagttagagggaagtgcctgacatttcacactttaggaaactgaggcccatgagcggtaagagaatgtcctaaaggcataccgagtcaatagcagagctggggccacccctcattgctccctctggcctccccatccaccctccagctgctcttccatggctggggtggggtgcaagtggggtccttcataagctgaccttggggccttcccagacgggtgttttgtctcgaaagaaatgctaccctcataattgcctccaccacaataatgttcccacctccacattagagatctactgccctttccacaattcacagtcatatttgggtggtcagcaccacaccaggactgtgccaccacacctgtccctctggagtccacttccagtcactttcctacggcacagggtttttctgcctggctcccggttggggctgagtcggtcgatgagtgaacttcagccctgcaggtccagaccctgcacaacctccttcctcctgcggctcctcctgccatcccacccccacccctactcggccaagttcagaccaggactcttctgttgcgttcttccttcggggtcacatgccccttgccgggctgcgcgctctgtcttgcaaacctcttctcttacccgttcagtccttggcgggtcccttcagcctggcagtcagcggaccagtgcccaatcccaaagccagtctctgggtgtgtccccacccactctcccatgaccttatctcccccggggctggagggcgtggaaaggcgcagactgcagaactatcgtttcccccgccccaacccgctccgcaggcccctgaaccgaaagagggcggggccgggcagacggcgctggcaccgcgccggcgcgccctcagttggaaagaaagtcgatggacgcgcgcacggagcgattggtgctgacgtcgacggcggtgaccttaatttcggtgtcgccaaactgcatggcggcgcggatctcgcggcggccgggaggcgcgccggcggtgtcctggccgcagtcggcgggctcaagctcgaggctgagcgcgccacatttgcgcacgccggggtcggtgatgaagcgcgcatcctctgccgcgcagcagtacaggttgatgagtacgcgccgctggccgggacgcgccgggcagtagctgcgccgcacctcctcgcccagggccaccgactgctcggcggccacgaagcgctcgaagacgtcggtgcaccagcggcggccgtcgcgaaccagcagcttttcgggcgggtggcgcccaggcacaaagcggttgagcacgcccacgccataggtgagcggcgagcggcggacccgcaccacgcccggcgcctggccgaacagcaccgcgcctttgaggatggtgaggcccacgtcgtgcgggaccacgacacgcagaccgcgggcgcccagcgccgcctgcaccgcgtgctgcagcaccgctgactcggcgaagccgcccactaggaacagcagcttcacaccctgcacctccggccgtgccagcagggcctctatgtgctggatgatcccgctgacggtgggctgaaagagctcgttcatggcttcacaagacattcggagcatcccctgtgaggaccacttcacgaagttcacgctgctcctgcgcagagcggtctccacgttgtggccccgctgcttgcggtagaagtcaatgaaggagaagggcagcgagatgttgagcgcccctgcacggtgtgggccagcagtgcgcttgcgagcctcgaaggcgatggtcagatctacccaggctgccggccgttgccttttgaaggtggcgatgaagtcctcgccgaagatgcggcacagcagctgctcgaaggccaggtccacgcccaccgcgccataagggcccccagatgccttgtagagctccttgagggtgccatggggctgctccagctggtgcaccgtcaggtccacggtgcctccgccgcagtcggccaccacgtagcggtctcctgcttgcatctctgcccacagctctcctacgcctgaatccaccaggaacgtgcggctgtggcgggaccttcgcagctgctcccgagcctgacggaagctggagtcgatggagcggcgctcacccaggcgcccaccacctggggcccggccactcaggtccaggagctggtgcaggcgcagcttgcggcagtataccgaggcggcctcgggctccagggcgatgagtagctgctctgcattctctcgggacactagtccagccaggtaggcagcctcccgcatgaactgcttggctggctgtttccagatggcaggcaccgtcaacacccagcgcacagtgtccttctctggcagcgatgggctctgctccctcagctcctgaagggcgtgctccctgaagaagcgcagggcatgggcgaacacctccagggcgggcatcgtctttccatttactgcctctagctgggtcttcaaggtgagatccgtggcgctgtggatcttcatcttgaacttctcgaagtagagccagtcccgcgcctcttcggggtccaggtcatggtagtaatcgcgggcggtgtagccaaagctgtggaaggcgccctccggagtcagcagcaggcaggtcggggtcttctggtgggccacgcccgggtctccgccctcccatttcctcatcatgtggatggcctcagggtcactggcaaagctgaaagcatagccactagacgtggtgccgaagtcaatggccaccaccacagagaaggaggcctgctggggggctcggacctcgggttttggagactgcgagggtgtgaggggggcaatgccgcagctttcctgggtcctcggggagccgggtgggctaggcactggggaccgctccgggctggagccgatgtacagcccctgcaggcccatctccgggacannnnnnnnnnnnnnnnnnnntgtagctccgccctcccgacagctccagccccgtccagccgccgcgatcccgggcccgcagctcgtt

SEQ ID NO: 7552 - DNA, 547 bp, Homo sapiens
aggatacttcttggcctctcttctggcttctggtggctgcagcaatccttggggttccttggcttatggatgcatcactccgtactctgcttccgtcctcacttgaccttctcacctaccttcctttacgtcatcttccttctgagatgctctgtgtccaaattttattctttgtaaaaggatgccagtcattggatcagagaccaccttaatccaggatgacttcatcttaactaaattacatctgcaaagattctatttctaaataaacccacattctgaggttctgggtgggcatgctatttggcaggacaaagtcaacacaggacactcattttcaggattgatcgcatggtttgaggaagctgatggtgacatctcttcttaaatctgttttcaggaaaatcatactggtagccttcaagtggccatggtgggagcattgacccagggaaatccacatttcccaacacatgctggatacctgaggactccagagctactatctgctcatatctgctcaacattaaaaaaaaaaaaaaaaaaa

SEQ ID NO: 7553 - DNA, 3399 bp, Homo sapiens
ggcacgagggtgagccggagagggtgaagcaggcaggaagctgcaggccggcggtggatggggccaggaagcatgcagggggagtgaggaccgtgtatgagagaaacactgcccaagagagaagaaagaaaatcacaggacccgaggaaaaagaatgagtggtgtgttcagagatgacacatgacaacaaattgtttgcttggaggattttcttacgcgtgcgtgtttaaactggcctcaaggaggaagaagaaacatgcgttcctggatgactgagttctggaatattctgtcataagactttgcaactggagtagccccagaaaaaggcaggcagtgggagttggctccctccccaaagccatccctgagttggctttgttttgggttcctcccaggtggaatttaggcaaaacttacagtattgttctgggatctgggcaagttgtgttggggatggacatgggtctcagagagatgtgcgttggcgagaaacggacagtgatcattccgcctcacctgggctatggggaagctggcgtggatggagaagtgcccggcagtgccgtattagtgtttgacattgagctgctggagctggtggctggccttcccgaggggtacatgttcatatggaatggtgaggtgtcacccaacctttttgaagaaattgacaaggatggcaacggagaagtcctcctggaagagttctcagagtacattcacgcccaggtggcatctggcaaagggaaactcgctcctggctttgatgctgagctgattgtgaagaatatgttcaccaaccaggaccggaatggagatgggaaggtcacagctgaggaatttaaactcaaagaccaggaagccaaacaggatgaactctaaacctggcacgaaccagatggtgccagggagtacgtgacaccaagccaactgtgtggcagaacgtgcagtgagggtgcaagggtctttcagaagttgcatcattagccagtagtaggtgggtcacatagtacctggtgtacacatcggggtgggttgatatatggggtgagaagtttaggctgatcgccagtgatagtaaacaaaatctgtgcagagggccttagcatgggatgtgtccagtattgaaaaggctgcactgccaaccatgatttgtgaaccttctgggaaattttgttattaaaagaatatatagtgtcagacggaagttataatcatcttggaggaaccataagaaaaagtgtccagggtatctatataaagagggttaaatttttttttaacttgctggttaaaacattttagaaatattcttgagatgggcaggagagtcaaagggcttgcttgccccagcagagttcccagcagacagccatggctcttcccagcagcctgtgcaaattctgatgatgaccccacccccgcacacgcacacgcacatcatgcttttccagctcatcacaccccgccccactatgggcctaccattaatagtgtatatcttggaggttaaaagagccttttggacagaaaactgggccaggaaaaggcatctcagaccacaaatagagaatttgattcctcatttgccacataagtcatctgcttagcttttcctttctttttttttttttttttttttttggaggcagagtctccgtttgtcgccaggctggagtgcagtggtgccatctcggctcactgcagcactgtctcggctcactgcagcctccgcctcccgtattcaagcgattctcctgtctcagcctcctgagtagctaggactacaggtgtgcaccaccacgccccgctaatttttgtatttttggtagagacggggtttcaccgtgttggccaggatggtctcaatctcgacctcgtgatccgcccacctcggcctcccaaagtgttgggattacaggcgtgactcaccatgcccagccacttagttttttcttattcccacctttctatcccatagaacactcttttttatcttccctgaaccatattgatgagataaatagggctgggggctgggccccgctggtcactcaacagagtatttcccttggccgagatggaagttttgtcccaatagatgagctgctgagcatcaacaaggtgacatttttctgctgcccatttgtgtcctggagacggtggtaccctgaaggcagaggccagctgccgcaagacagcaatgacagtccacctgccgacctgattcctgcatcatggaataaccacatggctaccttctatcctctgttcccaaatggtggtggcacttatcctgaagtcgtcaatgatttccctttgaaactactttattttactaatttaaactattttgtactgatgtagccctgaggtagttcatgaaaatgctgtgcactcattccatggaataaatgttggaaagctgatcttttctgatataaaatgttgaattataaaaaaaaaaaaaaaaaaaaaaaaaaaaaaaaaaaaaaaaaaaaaaaaaaaaaaaaacctaaaaaaaaatcacaaaaagggccggggggcccccctctcaaatttctcccagggggccgcacccttagcggacccctttttttttaaaaaagggcgccccctatgggccaccattaaaaagtcgggcgctgggcggttgttaaacacccggagaaggggagaaaaattagtcgagtgggaaaattttggaaaaaacaacctcctttcttgtgggggggccaaaagctgcaacaacacacccctctccaggacatttacagggtcttcgggaaaaaaaaacaaaaattttttacacgggattaaaaacgggtgtaaaaaaacacccgccgcaaaactattactaccgcaccataaagaaaacacttgtgggttcacttatgagaggaaatatattcttttatatacaaaccatttttattctccaccccacgcggagcgctccggccccgacatcctcccacggctttgtgggccgcgctcttctccaaagcatccccccccccgcccccggggtggaggcttattatctcaagagccctcctctctaacacccctctcaaggggagcccgcccccacaacgtctataacaccacaccacatgtacaccccccttttagtattcccgcgtctttatcacaccgcgcagaaaaaaaagacaccctctccccacaaattctttctcctctgaaaaactgtgtaaacaaaaaccaaacacatccacactctatgggctcgccccccacaatcccgcccccattcatgtcgagatttttctataagcgggcgaccacacacaaaatattgaatttctcccctcctactcctttcttttaagaaaaagaagacgactttttcttattttccactcgacctagtct

SEQ ID NO: 7554 - DNA, 498 bp, Homo sapiens
tttacagcagcaatagaaagttaacatgggggcagggttgggggaaggagtccgagagcctgaggcctgagaacaagacgggaagacattgctggacatttattttatgacgtgcctcatcagcagaacaaagaagggcatggacttatgtttaaaaactgtccagaagtgaccaaagaaattcaccagtgatgcagatgagctcctaataatcatgccatcggagcaggctgtgatagcctggaaatcctgcctgaaaccaaactgcaacatttccaactaagaaatcaagcggtgataaacctcagtatctgaaagggttaaatattgtgcccacgtgactactgttctttctttctgtgaattaatgtgtgtgccagaaaatatttgtgaataaaaaacaattacataatctcattgtcatgaatgtggttatttatctctgagcgttaagactgatttttccccccactgaacatcttagtgtaaatatcagag

SEQ ID NO: 7555 - DNA, 2516 bp, Homo sapiens
  misc_feature (800)..(817): n is a, c, g, or t
atcgtgaaatccatcttatccatcatctcatcggttcaacaggctcctcgtcctgggtgagcttatggttagaagtttttttagcaaagatttattacatacatagatgtgtgtgtgtacatatacttacacatacatacatacatatatgtgtgtttatttaacggtgctaatcaatcttgagcaggtcacgtgactggtcatgcggactctaaaatcatatcagattttttaaaatccttgatatatgcagatgttatacagattttcttagcagtgtaataacgttaaactgaagaaataaccatcctgcaggcttcaaaggacgaggtcagcaatatttcccaacatggcttgggggaaaaggatagttttgtctccttttgtattcaagtaatgcaaagtgcatttttgtctctaagtagcttttgactaaaagactttgtagtgtaaagggtgttatacaaactgtaatggtgtgcttcaaacaaatgctagaccctttcacctttgtcgtatatacaaagctgttaattatgtggtatgaattaactttgaacatgttgaaatatgtagcatgtctttaactcagacgaagattctgattgcacaggttgtgttctagccagttgtgatttatttgttcagaaacacaaatgtgaattgcactcttatcatcagaatattgtatgagttcagtgatctttaaacagctcagaagtaatacttgaacttcatttgagtagcacaaagtttacatagccccttttaaatgttaattcgttccatttaagttttcnnnnnnnnnnnnnnnnnnggtatttttcctcttggaaatagtacgtactttgctttggtatgtagcaaaaggcttccatttctggaagggttttcttgttcttaaacaaggtcagccaggtaccagattctaaaagaacaaattgtcccccacccctcaagtggccttctgactgcacgagaatgtgctactaccctctgtagtctcccctaacacgagaggtcagtgaaattgatggaggaagtgcaaggcttgcttcccctcacccttaaagcttaaagcagttgtaagattttcagtccagcacatacagtcccagtgcccagcacaccggaagtttgtatactggcctcttatcttgtcttcaaatgtgcaggaaatttgaaactgtcatctggaataggttccatctcttatgtgtgttagatcaaaccaaagaagcccccagccatgcccaaatgctgcgttcaaaagcctgccttccagtccttacttaggcttgcaggattctaaatgtgttaacttttttatttttgtacagtttctaagtgatttttgctagtgatgttaaaatgaattaagtttatttgaggggtgtgagcacctcctccatttaaataaactggtgactttccttttattttttaaaagtggaaacccgttgtgtgcctctcgatttaagggtttctgatgacattattcttaagaccagcattgatcctttatatacaaatatatgttttccttgttttttattgctatttcagaagaaaatgaaccttttattttgctctacccagtaactgcgctggtacatagacgcactgagcaaacaaacttttgtaaccacctctgactacttttgtatatcaaagttgattacttttgaaatatttggatctagtttctaagttattttagtgttttatatgttccccaaaattactttgaatctgtcaccagcataatgagttcttggtgatacaatggtgagacttgtaatgagcaaaaagctacctggagtagctcctcttttccttctttcttagtaacctgttttttgattaccgtaagacatcacagattacctgaaaccccttccagtataactaggccctccttccttccacatttaattgcttaatagtttgaagaaactattggaaatgggcattttatatgacatgtatggctttacaatattaaatatgagcaaaaagaaaaaatatgagaaggtttatgtgggtctgtaaggtatggctgtggaaagaaattgtagtagttttgacactattgttattacctttaaaatcatttacccaataaaatgttaaaaccgaaaaaaaaaaaaaaaaaaaaaaaaaaaaaaaacaaaaacaaaaaaaaaaaacaaaacacacaacaaaaaaaaaaaaaaaaaaaaaaaacacagaaacacaaacacagaggacgcgcgccgcgagagagagaaaagaacgacacggagaagggggggagcgacaagtggcgagcgagaaagagaggaccacgcggaggggaagcgagacaagacgcgcgacagaggggcgggccggagcacccaccaacaaaccagacgccgcagagaacagcgaaaaggaaaaaaagacaaaagagcgacgcgaggagaaagagcaagcaaccacaaaggacacaacagcagagaaagacagccaagagaaacacagacgagcggggg

SEQ ID NO: 7556 - DNA, 1886 bp, Homo sapiens
gaggcttcatatgtgaggcactaagttgtgtttgtaggctgtgttgcttaaatctttactaagggaaaatttctaatattacagagataaaatatctttcttttctttttaagtgtctgtgttatgtttggataattctgagtctgaataatttgaatcttggcaggttgtcaatagggtgactggaaatttcaagcatgcatctcctattctgccaatcactgaattctcagacatacccagaagagcaccaaagaaaccattgacaagagctgaagtgggagaaaaaacagaggaaagaagagtagaaagggatattcttaaggaaatgttcccctatgaagcatctacaccaacaggaattagtgctagttgccgcagaccaatcaaaggggctgcaggccggccattagaactcagtgatttcaggatggaggagtctttttcatctaaatatgttcctaagtatgttcccttggcagatgtcaagtcagaaaagacaaaaaagggacgctccattcccgtatggataaaaattttgctgtttgttgttgtggcagtttttttgtttttggtctatcaagctatggaaaccaaccaagtaaatcccttctctaattttcttcatgttgaccctagaaaatccaactgaatggtatctctttggcacgttcaacttggtctcctattttcaataactgttgaaaaacatttgtgtacacttgttgactccaagaactaaaaataatgtgatttcgcctcaataaatgtagtatttcattgaaaagcaaacaaaatatatataaatggacttcattaaaatgtttttgaactttggactagtaggatatcacaaagtgctgggattacaggtgtgatccactgcacccggccggcattatgattttgtgtactcttgaaatggttatctttgtggatgatttttttttttaagctgaaacttacctcatgaataacttgattaaagtagtaggtgattaaaatttcaatagaatcaaatgagacaaaaattttaaactgactcatttgagtttcaactttacagtcattgaccataaagcacactaaaaatgtaagttatttttaaatacatctgaaataaaaatacttactaaaaaggaagaagccgaagatgtatatttagaccagcacacaattttgatttcaattagccttattctaatatttagcttttagatctttcatacacattttcacgtactttgcaattgagaccagaaagacttgtaggtctttctgcagaatgagtgggtccttgcaaagtgagtgggaaacttactcctagatcagaaatgtttgcctctctgagtaaaatgtttctttcagatgagccatagagggggcaccttttactcaacttttctttgttttgaaactttgtttcccatactgttttcagccttttgtttataattagaaattgtgagaagcttcatttagtgtttaaaaatgtggggagataaatcagacttaacatgtatgtaagatcaattcacttaaaagtatggtccaaatagcaaaaataggaccaggtgaaacatgtagtcattttttaaaaacatgtacttggtcttttgtgtgtgtctgttttattccattagaataaatgtgtccttgatgtaaatgcaaagcatttcttcctgattaaattgtagatgtagactttacaatataattcaataataaaaagtaattaacctctaaaaaaaaaaaagaaaaaaataaatggttttcagatagcacaaacaaaaaaaaaaaacagggggccgggccgcctcctagaaattattccccctccaaaggggggccccaagccttttaggcgggtttaccccaccttttta

SEQ ID NO: 7557 - DNA, 553 bp, Homo sapiens
  misc_feature (51)..(51): n is a, c, g, or t
ggcttctactatgaagtaatggggagagacttggccaagatctgctcagantacatggcttccactatagggttctacagtgtcagccggttgccacaaggagcttatcggacaatatctgtgcagtctgtgggcagaagatcattgtggagcttgatgaagaagggctcattgaaaacacctaggatgtttcatgtaatcatgtctgggagcgcacacattttctgtatggacaaatcctggattggcttcgttatttggtggcctggcaacctgtggtgatgggaatagttcgaaggcattaactattcactagggctggaataggacagcagaccccagaagcaacatactgcatggttgaaatccttggtccaacatttaatattaatttttttaattttagagatgatcccaagtgtttagaaaactaagtaaactttgttgtcaagcaatttgtccatgtggaaagaatttaaagagaagctgaacaatggaataaacaaataaagcatgttttttcatctttcccaaaaaaaaaaaaaaaaaaaaa

SEQ ID NO: 7558 - DNA, 952 bp, Homo sapiens
gggtactcgtgaagctggagcgggccggcggtgcagtcacgggggagcgaggcctgctgggcttggcaacgagggactcggcctcggaggcgacccagaccacacagacactgggtcaaggagtaagcagaggataaacaactggaaggagagcaagcacaaagtcatcatggcttcagcgtctgctcgtggaaaccaagataaagatgcccattttccaccaccaagcaagcagagcctgttgttttgtccaaaatcaaaactgcacatccacagagcagagatctcaaagattatgcgagaatgtcaggaagaaagtttctggaagagagctctgcctttttctcttgtaagcatgcttgtcacccagggactagtctaccaaggttatttggcagctaattctagatttggatcattgcccaaagttgcacttgctggtctcttgggatttggccttggaaaggtatcatacataggagtatgccagagtaaattccatttttttgaagatcagctccgtggggctggttttggtccacagcataacaggcactgcctccttacctgtgaggaatgcaaaataaagcatggattaagtgagaagggagactctcagccttcagcttcctaaattctgtgtctgtgactttcgaagttttttaaacctctgaatttgtacacatttaaaatttcaagtgtactttaaaataaaatacttctaatggaacaaaaaaaaaaaaaaaagagaaaaaaagaaaagaaagaaaaaaaaaaaaagggggggggggcggaaaaaattattcccaaggaggggccccgaagatttaaagggcgcaccgcggttttttgtgaaagaagggggcccccaaaaagggggggataaaaaaaggagaagaaaggcggggggttaaacaaggggggagggagaaacagggggggaaaattggga

SEQ ID NO: 7559 - DNA, 5941 bp, Homo sapiens
  misc_feature (790)..(812): n is a, c, g, or t
  misc_feature (1287)..(1341): n is a, c, g, or t
  misc_feature (4400)..(4421): n is a, c, g, or t
cttttcccatcgtgtagtcaagagtctgtgccagacttgaaggctttactttgttagccatgtgtttatgaacccccagcgctttccctagatcttttggctgataatctcaaacatggaggatgcttctgaatcttcacgaggggttgctccattaattaataatgtagttctcccaggctctccgctgtctcttcctgtatcagtgacaggctgtaaaagtcatcgagtagccaataaaaaggtagaagcgaggagtgaaaagctcctcccaacagctcttcctccttcagagccgaaagtagatcagaaacttcccaggagctccgagaggcggggaagtggcggtgggacgcaattccccgcgcggagtcgggcagtggcagcgggagaagcggcagccaggggcgcggcggggccggagagaggcagtcccctgggaagacgggtctcccctcgttgcctttgtagtggagaaggtggacaagtggcagtcggcgtgatcgcagggaagcggggccggcgcgggcgcgacgggtccaggcgagccccgggcggacgggagatgccgctgctacaccgaaagccgtttgtgagacagaagccgcccgcggacctgcggcccgacgaggaagttttctactgtaaagtcaccaacgagatcttccgccactacgatgacttttttgaacgaaccattctgtgcaacagccttgtgtggagttgtgctgtgacgggtagacctggactgacgtatcaggaagcacttgagtcagaaaaaaaaagacannnnnnnnnnnnnnnnnnnnnnnaaccactaattattccagttttatacttgaccagccttacccatcgttcgcgcttacatgaaatttgtgatgatatctttgcatatgtcaaggatcgatattttgtcgaagaaactgtggaagtcattaggaacaatggtgcaaggttgcagtgtacgattttggaagtcctccctccatcacatcaaaatggttttgctaatggacatgttaacagtgtggatggagaaactattatcatcagtgatagtgatgattcagaaacacaaagctgttcttttcaaaatgggaagaaaaaagatgcaattgatcccttactattcaagtataaagtgcaacccactaaaaaagaattacatgagtctgctattgttaaagcaacacaaatcagccggagaaaacacctattttctcgtgataaactaaagctttttctgaagcaacactgtgaaccacaagaaggagtcattaaaannnnnnnnnnnnnnnnnnnnnnnnnnnnnnnnnnnnnnnnnnnnnnnnnnnnnnnatttcttccctgatgatccacccacatttatcttcagtcctgctaacagacgaagagggagacctcccaaacgaatacatattagtcaagaggacaatgttgctaataaacagactcttgcaagttataggagcaaagctactaaagaaagagataaacttttgaaacaagaagaaatgaagtcactggcttttgaaaaggctaaattaaaaagagaaaaagcagatgccctagaagcgaagaaaaaagaaaaagaagataaagagaaaaagagggaagaattgaaaaaaattgttgaagaagagagactaaagaaaaaagaagaaaaagagaggcttaaagtagaaagagaaaaggaaagagagaagttacgtgaagaaaagcgaaagtatgtggaatacttaaaacagtggagtaaacctagagaagatatggaatgtgatgaccttaaggaacttccagaaccaacaccagtgaaaactagactacctcctgaaatctttggtgatgctctgatggttttggagttccttaatgcatttggggaactttttgatcttcaagatgagtttcctgatggagtaaccctagaagtattagaggaagctcttgttggaaatgacagtgaaggcccactgtgtgaattgctttttttcttcctgactgcaatcttccaggcaatagctgaagaagaagaggaagtagccaaagagcaactaactgatgctgacaccaaaggctgcagtttgaaaagtttggatcttgatagctgcactctttcagaaatcctcagactgcacatcttagcttcaggtgctgatgtaacatcagcaaatgcaaagtatagatatcaaaaacgaaggaaggatttgatgctacagatgatgcttgtatggagcttcgtttgagcaatcccagtctagtgaagaaactgtcaagcacctcagtgtatgatttgacaccaggagaaaaaatgaagatactccatgctctctgtggaaagctactgaccctagtttcaactagggattttattgaagattatgttgatatattacgacaggcaaagcaggagttccgggaattaaaagcagaacaacatcgaaaagagagggaagaagcagctgccagaattcgtaaaaggaaggaagaaaaacttaaggagcaagaacaaaaaatgaaagagaaacaagaaaaactgaaagaagatgagcaaagaaattcaacggcagatatatctattggggaggaagaaagggaagattttgatactagcattgagagcaaagacacagagcaaaaggaattagatcaagatatgttcactgaagatgaagatgacccaggatcacataaaagaggcagaagggggaaaagaggacaaaatggatttaaagaatttacaaggcaagaacagatcaactgtgtaacaagagagcttcttactgctgatgaggaagaagcattaaaacaggaacaccaacgaaaagagaaagagctcttagaaaaaatccaaagtgccatagcctgtaccaatatctttcccttgggtcgcgaccgcatgtatagacgatactggattttcccttctattcctggactctttattgaagaggattattctggtcttactgaagacatgctgttgcctagaccttcatcatttcagaataatgtacagtctcaagatcctcaggtatccactaaaactggagagcctttgatgtctgaatctacctccaacattgaccaaggtccacgtgaccattctgtgcagctgccaaaaccagtgcataagccaaatcggtggtgcttttacagttcttgtgaacagctagaccagcttattgaagctcttaattctagaggacatagagaaagtgccttaaaagaaactttgttacaagagaaaagcagaatatgtgcacagctagcccgtttttctgaagagaaatttcatttttcagacaaacctcagcctgatagcaaaccaacatatagtcggggaagatcttccaatgcatatgatccatctcagatgtgtgcagaaaagcaacttgaactaaggctgagagattttcttttagatattgaagatagaatctaccaaggaacattaggagccatcaaggttacagatcgacatatctggagatcagcattagaaagtggacggtatgagctgttaagtgaggaaaacaaggaaaatgggataattaaaactgtgaatgaagacgtagaagagatggaaattgatgaacaaacaaaggtcatagtaaaagacagacttttggggataaaaacagaaactccaagtactgtatcaacaaatgcaagtacaccacaatcagtgagcagtgtggttcattatctggcaatggcactctttcaaatagagcagggcattgagcggcgttttctgaaagctccacttgatgccagtgacagtgggcgttcttataaaacagttctggaccgttggagagagtctctcctttcttctgctagtctatcccaagtttttcttcacctatccaccttggatcgtagcgtgatatggtctaaatctatactgaatgcgcgttgcaagatatgtcgaaagaaaggcgatgctgaaaacatggttctttgtgatggctgtgataggggtcatcatacctactgtgttcgaccaaagctcaagactgtgcctgaaggagactggttttgtccagaatgtcgaccaaagcaacgttctagaagactctcctctagacagagaccatccttggaaagtgatgaagatgtggaagacagtatgggaggtgaggatgatgaagttgatggcgatgaagaagaaggtcaaagtgaggaggaagagtatgaggtagaacaagatgaagatgactctcaagaagaggaagaagtcagcctacccaaacgaggaagaccacaagttagattgccagttaaaacaagagggaaacttagctcttctttctcaagtcgtggccaacaacaagaacctggaagatacccttcaaggagtcagcagagcacacccaaaacaactgtttctnnnnnnnnnnnnnnnnnnnnnngagagataaactctgctcctcctacagaaacaaaatctttaagaattgccagtcgttctactcgccacagtcatggcccactgcaagcagatgtatttgtggaattgcttagtcctcgtagaaaacgcagaggcaggaaaagtgctaataatacaccagaaaatagtcccaacttccctaacttcagagtcattgccacaaagtcaagtgaacagtcaagatctgtaaatattgcttcaaaactttctctccaagagagtgaatccaaaagaagatgcagaaaaagacaatctccagagccatcgcctgtgacactgggtcgaaggagttctggccgacagggaggagttcatgaattgtctgcttttgaacaacttgttgtagaattggtacgacatgatgacagctggccttttttgaaacttgtttctaaaatccaggtcccagactactatgacatcatcaaaaagcccattgccttaaatataattcgtgaaaaagtgaataagtgtgaatataaattagcatctgagtttattgatgacattgagttaatgttttcgaactgctttgaatacaaccctcgtaacacaagtgaagcaaaagctggaactaggcttcaagcattttttcatattcaggctcaaaagcttggactccacgtcacacccagtaatgtggaccaagttagcacaccaccggctgcgaaaaagtcacgaatctgactttgtccttctaaaggatatatttgaagaaaaacaaattgttcatgaaaatggaacattaaatcatgctgtataaagcaataacaaacaattgattgaccacatgaaagtgtggcctgcactatattctcaattttaatattaagcactcaggagaatgtaggaaagatatcctttgctacagttttgttcagtatctaataagtttgatagatgtattggatacagtactggtttacagaggtttttgtacatttttgagatcattcatgtgtccagagatcttggaaaatattttttcacccacgatttattttgttattgatgatttttttttaaagtggtggtattaagggagagttatctacatggatgagtcttccgctatagcacagtttagaaaaggtgtttatgtcttaattaattgtttgagtacattctttcaacactacacatgaatgaatccaatcttataaccttgaagtgctgtaccagtgctggctgcaggtattaagtccaagtttattaactagatatttatttagtattgagagtaatttgtgaatttgttttgtatttataaaatttatacctgaaaaatgttccttaatgttttaaaccttttactgtgtttttattcctctaacttccttaatgatcaatcaaaaaaagtaacaccctccctttttcctgacagttctttcagctttacagaactgtattataagtttctatgtataactttttaactgttcaaataaaatacatttttccaataaaaaaaaaaaaaaaaac

SEQ ID NO: 7560 - DNA, 1923 bp, Homo sapiens
cgtcctcgctgctcacatttcggcggagggcgcgctccctggaaaattccactcctgtgctagctccaccctatgcggcttttctcctacccgacgctcttcactctcagctcccttcccggcggcctttgcgggaacaagatggcagcccccatacctcaagggttctcttgtttatcgaggtttttgggctggtggtttcggcagccagttctggtgactcagtccgcagctatagttccagtaagaactaaaaaacgtttcacacctcctatttatcaacctaaatttaaaacagaaaaggagtttatgcaacatgcccggaaagcaggattggttattcctccagaaaaatcggaccgttccatacatctggcctgtacagctggtatatttgatgcctatgttcctcctgagggtgatgcacgcatatcatctctttcaaaggagggactgatagagagaactgaacgaatgaagaagactatggcatcacaagtgtcaatccggaggataaaagactatgatgccaactttaaaataaaggacttccctgaaaaagctaaggatatctttattgaagctcacctttgtctaaataactcagaccatgaccgacttcataccttggtaactgaacactgttttccagacatgacttgggacatcaaatataagaccgtccgctggagctttgtggaatctttagagccctctcatgttgttcaagttcgctgttcaagtatgatgaaccagggcaacgtgtacggccagatcaccgtacgcatgcacacccggcagactctggccatctatgaccggtttggccggttgatgtatggacaggaagatgtacccaaggatgtcctggagtatgttgtattcgaaaagcagttgacaaacccctatggaagctggagaatgcataccaagatcgttcccccatgggcaccccctaagcagcccatccttaagacggtgatgatccctggccctcagctgaaaccagaagaagaatatgaagaggcacaaggagaggcccagaagcctcagctagcctgatgacaaaaatgacttctagggtgaagcctgggtgatgaggctgctggaagctttgaagtctcccattcccctcatgctataaaaagaactacctttgttctctcccatcctgctcaggtcttttcagcagtctcatcatcagcaaccatgactgatgactgggccctagcaggtggcaggtataacatggccatggacactcttcttttttaaattttatgtctagcttctgagtctagatgaaagacagtatgtttcagagaacattggatatcagtttttccccacagcagggactgtgagagacaacccagcagcatcctctttgtaatcacagggcagggatcagagtttgaaatgaaatgttgtcagggtgttggaaaaattttggtgagttctgcacatttcccctggttcaggctgggcatggaccagccttcagatggcagaagtggaagatgagcctacttgtgagcgatgtgactttaaggaaatgaagactggggaagaataattagtgtttataagacatttaagaggccctttttcatatactgactcactgatgaatcagcatttgcattttatggaaaaatataaatccaaagaaataatttatcccttaaaaaaaaaaaaaaaaaataattattagctgtatcaggaagtgttggggggaggcaggggccatggagaagttgttacttttggaaaattttatctgcaggactttggttcccggaattctagcaccattttggaaaatggggacttggtcttttccagcccagtattgaagggggagtgtaccaaaagaatgaaacctgtgcagaaggaaaatagggccagccccctcccttggtc

SEQ ID NO: 7561 - DNA, 1882 bp, Homo sapiens
caacgggaaactattagatatagtgtaggtaacgtgagtaagcagtgacagacgctggcggccaccagaagtttgagcctctttggtagcaggaggctggaagaaaggacagaagtagctctggctgtgatggggatcttactgggcctgctactcctggggcacctaacagtggacacttatggccgtcccatcctggaagtgccagagagtgtaacaggaccttggaaaggggatgtgaatcttccctgcacctatgaccccctgcaaggctacacccaagtcttggtgaagtggctggtacaacgtggctcagaccctgtcaccatctttctacgtgactcttctggagaccatatccagcaggcaaagtaccagggccgcctgcatgtgagccacaaggttccaggagatgtatccctccaattgagcaccctggagatggatgaccggagccactacacgtgtgaagtcacctggcagactcctgatggcaaccaagtcgtgagagataagattactgagctccgtgtccagaaactctctgtctccaagcccacagtgacaactggcagcggttatggcttcacggtgccccagggaatgaggattagccttcaatgccaggctcggggttctcctcccatcagttatatttggtataagcaacagactaataaccaggaacccatcaaagtagcaaccctaagtaccttactcttcaagcctgcggtgatagccgactcaggctcctatttctgcactgccaagggccaggttggctctgagcagcacagcgacattgtgaagtttgtggtcaaagactcctcaaagctactcaagaccaagactgaggcacctacaaccatgacataccccttgaaagcaacatctacagtgaagcagtcctgggactggaccactgacatggatggctaccttggagagaccagtgctgggccaggaaagagcctgcctgtctttgccatcatcctcatcatctccttgtgctgtatggtggtttttaccatggcctatatcatgctctgtcggaagacatcccaacaagagcatgtctacgaagcagccagggcacatgccagagaggccaacgactctggagaaaccatgagggtggccatcttcgcaagtggctgctccagtgatgagccaacttcccagaatctgggcaacaactactctgatgagccctgcataggacaggagtaccagatcatcgcccagatcaatggcaactacgcccgcctgctggacacagttcctctggattatgagtttctggccactgagggcaaaagtgtctgttaaaaatgccccattaggccaggatctgctgacataattgcctagtcagtccttgccttctgcatggccttcttccctgctacctctcttcctggatagcccaaagtgtccgcctaccaacactggagccgctgggagtcactggctttgccctggaatttgccagatgcatctcaagtaagccagctgctggatttggctctgggcccttctagtatctctgccgggggcttctggtactcctctctaaataccagagggaagatgcccatagcactaggacttggtcatcatgcctacagacactattcaactttggcatcttgccaccagaagacccgagggaggctcagctctgccagctcagaggaccagctatatccaggatcatttctctttcttcagggccagacagcttttaattgaaattgttatttcacaggccagggttcagttctgctcctccactataagtctaatgttctgactctctcctggtgctcaataaatatctaatcataacagcaaaaaaaaaaaaaaaaaaaaaaaaaaaaaa

SEQ ID NO: 7562 - DNA, 2063 bp, Homo sapiens
cagagcagctcctcaggtgaaactaagcgtcgagtcagacggcaccataatcgcctttaaaagtgcctccgccctgccggccgcgtatcccccggctacctgggccgccccgcggcggtgcgcgcgtgagagggagcgcgcgggcagccgagcgccggtgtgagccagcgctgctgccagtgtgagcggcggtgtgagcgcggtgggtgcggaggggcgtgtgtgccggcgcgcgcgccgtggggtgcaaaccccgagcgtctacgctgccatgaggggcgcgaacgcctgggcgccactctgcctgctgctggctgccgccacccagctctcgcggcagcagtccccagagagacctgttttcacatgtggtggcattcttactggagagtctggatttattggcagtgaaggttttcctggagtgtaccctccaaatagcaaatgtacttggaaaatcacagttcccgaaggaaaagtagtcgttctcaatttccgattcatagacctcgagagtgacaacctgtgccgctatgactttgtggatgtgtacaatggccatgccaatggccagcgcattggccgcttctgtggcactttccggcctggagcccttgtgtccagtggcaacaagatgatggtgcagatgatttctgatgccaacacagctggcaatggcttcatggccatgttctccgctgctgaaccaaacgaaagaggggatcagtattgtggaggactccttgacagaccttccggctcttttaaaacccccaactggccagaccgggattaccctgcaggagtcacttgtgtgtggcacattgtagccccaaagaatcagcttatagaattaaagtttgagaagtttgatgtggagcgagataactactgccgatatgattatgtggctgtgtttaatggcggggaagtcaacgatgctagaagaattggaaagtattgtggtgatagtccacctgcgccaattgtgtctgagagaaatgaacttcttattcagtttttatcagacttaagtttaactgcagatgggtttattggtcactacatattcaggccaaaaaaactgcctacaactacagaacagcctgtcaccaccacattccctgtaaccacgggtttaaaacccaccgtggccttgtgtcaacaaaagtgtagacggacggggactctggagggcaattattgttcaagtgactttgtattagccggcactgttatcacaaccatcactcgcgatgggagtttgcacgccacagtctcgatcatcaacatctacaaagagggaaatttggcgattcagcaggcgggcaagaacatgagtgccaggctgactgtcgtctgcaagcagtgccctctcctcagaagaggtctaaattacattattatgggccaagtaggtgaagatgggcgaggcaaaatcatgccaaacagctttatcatgatgttcaagaccaagaatcagaagctcctggatgccttaaaaaataagcaatgttaacagtgaactgtgtccatttaagctgtattctgccattgcctttgaaagatctatgttctctcagtagaaaaaaaaatacttataaaattacatattctgaaagagcattccgaaagatgggactggttgactcttcacatgatggaggtatgaggcctccgagatagctgagggaagttctttgcctgctgtcagaggagcagctatctgattggaaacctgccgacttagtgcggtgataggaagctaaaagtgtcaagcgttgacagcttggaagcgtttatttatacatctctgtaaaaggatattttagaattgagttgtgtgaagatgtcaaaaaaagattttagaagtgcaatatttatagtgttatttgtttcaccttcaagcctttgccctgaggtgttacaatcttgtcttgcgttttctaaatcaatgcttaataaaatatttttaaaggataaaaaaaaaaaaaaaaaaaaaaaaaaaaaaaaaaaaaaaaaaaaaaaaaaaaaaaaaaaaaaaaaaaaaaaaaaaaaaaaaa

SEQ ID NO: 7563 - DNA, 2548 bp, Homo sapiens
  misc_feature (25)..(25): n is a, c, g, or t
  misc_feature (1002)..(1017): n is a, c, g, or t
gtacacattccaaaaagagattgantacacttgcaatgaagggttcttgcttgagggagccaggagtcgggtttgtcttgccaatggaagttggagtggagccactcccgactgtgtgcctgtcagatgtgccaccccgccacaactggccaatggggtgacggaaggcctggactatggcttcatgaaggaagtaacattccactgtcatgagggctacatcttgcacggtgctccaaaactcacctgtcagtcagatggcaactgggatgcagagattcctctctgtaaaccagtcaactgtggacctcctgaagatcttgcccatggtttccctaatggtttttcctttattcatgggggccatatacagtatcagtgctttcctggttataagctccatggaaattcatcaagaagggtgcctctccaatggctcctggagtggcagctcaccttcctgcctgccttgcagatgttccacaccagtaaattgaatatggaactgtcaatgggacagattttgactgtggaaaggcagcccggattcagtgcttcaaaggcttcaagctcctaggactttctgaaatcacctgtgaagccgatggccagtggagctctgggttccaccactttgaacacacttcttgtggttctcttccaatgataccaaatgcgttcatcagtgagaccagctcttggaaggaaaatgtgataacttacagctgcaggtctggatatgtcatacaaggcagttcagatctgatttgtacagagaaaggggtatggagccagccttatccagtctgtgagcccttgtcctgtgggtccccaccgtctgtcgccaatgcagtggcaactggagaggcacacacctatgaaagtgaagtgaaactcagatgtctggaaggttatacgatggatacagataccagatcaatcacctgtcagaaagatggtcgctggttccctgagagaatctcctgcagtcctaaaaaatgnnnnnnnnnnnnnnnnataacacatatacttgtacatggggacgatttcagtgtgaataggcaagtttctgtgtcatgtgcagaagggtatacctttgagggagttaacatatcagtatgtcagcttgatggaacctgggagccaccattctccgatgaatcttgcagtccagtttcttgtgggaaacctgaaagtccagaacatggatttgtggctcgcggtaaatacacctttgaaagcacaattatttatcagtgtgagcctggctatgaactagaggggaacagggaacgtgtctgccaggagaacagacagtggagtggaggggtggcaatatgcaaagagaccaggtgtgaaactccacttgaatttctcaatgggaaagctgacattgaaaacaggacgactggacccaacgtggtatattcctgcaacagaggctacagtcttgaagggccatctgaggcacactgcacagaaaatggaacctggagccacccagtccctctctgcaaaccaaatccatgccctgttccttttgtgattcccgagaatgctctgctgtctgaaaaggagttttatgttgatcagaatgtgtccatcaaatgtagggaaggttttctgctgcagggccacggcatcattacctgcaaccccgacgagacgtggacacagacaagcgccaaatgtgaaaaaatctcatgtggtccaccagctcacgtagaaaatgcaattgctcgaggcgtacattatcaatatggagacatgatcacctactcatgttacagtggatacatgttggagggtttcctgaggagtgtttgtttagaaaatggaacatggacatcacctcctatttgcagagctgtctgtcgatttccatgtcagaatgggggcatctgccaacgcccaaatgcttgttcctgtccagagggctggatggggcgcctctgtgaagaaccaatctgcattcttccctgtctgaacggaggtcgctgtgtggccccttaccagtgtgactgcccgcctggctggacggggtctcgctgtcatacagctgtttgccagtctccctgcttaaatggtggaaaatgtgtaagaccaaaccgatgtcactgtctttcttcttggacgggacataactgttccaggaaaaggaggactgggttttaaccactgcacgaccatctggctctcccaaaagcaggatcatctctcctcggtagtgcctgggcatcctggaacttatgcaaagaaagtccaacatggtgctgggtcttgtttagtaaacttgttacttggggttactttttttattttgtgatatattttgttattccttgtgacatactttcttacatgtttccatttttaaatatgcctgtattttctatataaaaattatattaaatagatgctgctctaccctcacaaaatgtacatattctgctgtctattgggaaagttcctggtacacatttttattcagttacttaaaatgatttttccattaaagtatattttgctactaaataaaaaaagccgc

SEQ ID NO: 7564 - DNA, 2781 bp, Homo sapiens
  misc_feature (1207)..(1229): n is a, c, g, or t
atcgccactctgggcactcctgagcccagctctcccctgcttctccccctcctacctgagaggctgcaccctccaacctcccattggctcgctccccccccccccccaccgtgccctccatcacgccctgcccccagggtggttcatttcccagccctgggtcaagggcctgccttcgcctcagggaccctcttcctttggatgagggggtccttgggtttcccagctgcttcctgctcagctgggccaccccctcccaccctggggttggggaggagcagggagtgggtgcccacagttttcctttgcttctcccagagctggtttgcacagcccttgtgtgtggggctagaatgtgccttagtcctgaatcctagcccttacccccatcctctctagacggtatgtcctgacataacagcagagtctggtgtggtgctggtgagggttcgccagccctcccctccccagggtcatagagggggccatgaggctggaattggccagtgactgaatcttggagatgtcggccaggtgctcccattggggtttctagcctgccctagggggaggtggtgatgttgggagtgggatctcctgagtccttgttgggcagaattggtgaggccagggatggcagggaaaagtggtaacaagcctctctgcccatctacttccaatccctctctcccttactgattttttgatgccctgtcttctgggcccctaggagggatgagagaggagtagccccctttttcagagagtttggggtctacctcagagctctccctgtcaaaaagcagctgcaagcctcgcaagggtggagtggggggagactgaggaccagtagtacctgcagggtgcccgtggctgtggccagtgtcccttagccaacctgctgggctcaccagttccccgtctgatctgcctgtgcgcctcccattcttctctacccagaacctgtcatgggctggggctcagattttcctggctttgggagcagacagaccagagccaccagccattcagaaaacttcttatagctaccttcatgcaaaactgttttcttcttccttctcaatggtgacatttgaagaggcagagcaccttggggctcctccttctgtcttaagagaaagccaaggcacgtagagtagggagaagaagggcaccatcctctctttcctccccagggtctactgcnnnnnnnnnnnnnnnnnnnnnnncttctctcagctcagctctttccatctaccaaatgggtgtaataatacttacctacctcacaggactgttgtgaggcttggcaagttttgtctaaaaacatctttttggcttggaaagggatctgggaagccaggtattaattgcagggatagttccaagtctgtcctgtcttcatctctgtgtcccatctctacaacccacatacagacacacacactctctctctctttctttccatcccaccccccttggaattatttagtctttgcaatattagaaaccttgactctgatgcttaaagcttcttgtccatggcttttgtttgatggttttcaatagaggtgactgagattgtagggggggcatttttggttgcccccatgcgtgggggcactactaagaatgctaaacttagtccccacaacaaagaatcatcctgtcccatgtcaacattatacccatggagaaacactggcatggatttgcactaggatgtatatgggcaaagctatcttccccaagtggaacctcagtgcatgcaaatctctgatggtggcttccagggcttgtgggctagagagagccacttacaaagtcgatcttgagagacctggccacatgcagctgggctgagtgatgtcagcgagactaaagacaaagttctgagctcctcatcaactacaaaatatgaaatcagcattccaggttctgggcttctccccatgtcgtaattgaacagaaggcagcccgaataaacccctgatgttagagaggcctggggagagcagccgatggggctcagactacatatggcaggccgatcagagctcttgtggagcgagggcttgagagcatgcttgtgagatggcaggaggtggggtgtgcttgtgtggagtgtgcgtgtgcaggcagtgtgggtgcatggcagcgtaactgtggagcggatgggctctgcatgtaaggggtgatgcatgatgggcagatgctggacatttgaggagccgtctttcttggcctgagctatgcctgttgaggcatctggagactgagaaagaatcaaaggcagagaagaccagccgtgctcctgcattccgtcactccatgacttcatctcagtgtcacagacagctgccatcagagggctggcagtagggagttccaggagcggggacttctcgggaaaatcctataacttgctttactttactttgtcccaggttggagtccctaccctcccacctcccacctgatatgcagtgcttttgactatcttatgcatggtttattcctctggcttggatgacaacaatacccatagtcaattttcctatgtaactatagatcaaatgatgcaacaacaggccttgggaggcctcaggtgtgcgagtgcctctgggaggcgcagatgcccacacagccagcactgacttgtgttcgagcacagaacggatataatcagtctggcctctacaacaagttttgcattgtagaattgtatttagctttgccttggatgaaataaaaattatgtttaataaaaaaaaaagaaaa

SEQ ID NO: 7565 - DNA, 641 bp, Homo sapiens
gacgatcccataggccaggtaccgggccccccgaagtgcattttttttttagaccagatggtttattattattttattttcatatacaaaaagataaaacttgaaatagttctagatttttcctcctattgttggggtgtaactgcttcttcacacagggggaaaaaactacattcacatcggtttatttgaggacccagtgcagagttcaagcagcaaaaccccaacttagcagatctaatttcaaacttgacactcatttctaaaattaccacagtaaaaaggaacaaagatccactgcaaatgaatgaactatgatacaatgttctttccaaaatgttttcattttgcaactgtaattacatggatgtctgctttaggccattttaggtgtatgtgtgtgtgtgtgtgtgtgtgtgtgtgtgtgtgtgtaatatatatatataaatcagcacacttttcataaacatgatactttagtataacttttgttaattcagtagtacaagctatttctgttctacaaaatttttattttatagctacaagggtgaaaagtgacctactacatttacatctcacatatcctggtatacaacagtacttatttgagccaaatactagaagtctttagttttagc

SEQ ID NO: 7566 - DNA, 1337 bp, Homo sapiens
  misc_feature (323)..(337): n is a, c, g, or t
cggacgagggcccttcccgcctctggggaagggaacttccgcttcggaccgagggcagtaggctctcggctcctggtcccactgctgctcagcccagtggcctcacaggacaccagcttcccagccctgtcaggttgaaatcagcattgccaagaggctcagagaggttaaggcacttgcctgaggttatgcagccggtagcagatggggctttaaagtcaagtgggcctgactccatgataggatcaccacggtggtaacctctcacattgtcttctccacaggaggcgtctgacacagtatgatgatgaagatcccatggnnnnnnnnnnnnnnnctgatcttgctcctgctcctgggcctaatcgatatctcccaggcccagctcagctgcaccgggcccccagccatccctggcatcccgggtatccctgggacacctggccccgatggccaacctgggaccccagggataaaaggagagaaagggcttccagggctggctggagaccatggtgagttcggagagaagggagacccagggattcctgggaatccaggaaaagtcggccccaagggccccatgggccctaaaggtggcccaggggcccctggagccccaggccccaaaggtgaatcgggagactacaaggccacccagaaaatcgccttctctgccacaagaaccatcaacgtccccctgcgccgggaccagaccatccgcttcgaccacgtgatcaccaacatgaacaacaattatgagccccgcagtggcaagttcacctgcaaggtgcccggtctctactacttcacctaccacgccagctctcgagggaacctgtgcgtgaacctcatgcgtggccgggagcgtgcacagaaggtggtcaccttctgtgactatgcctacaacaccttccaggtcaccaccggtggcatggtcctcaagctggagcagggggagaacgtcttcctgcaggccaccgacaagaactcactactgggcatggagggtgccaaacagcatcttttccgggttcctgctctttccagatatggaggcctgacctgtgggctgcttcacatccaccccggctccccctgccagcaacgctcactctacccccaacaccaccccttgcccagccaatgcacacagtagggcttggtgaatgctgctgagtgaatgagtaaataaactcttcaaggccaaggaacagtggtctaattcaactctgtgtcccagcacctggcacaccagaagtgccatgctcagaaatgttggttacatgaatgaatgaaccatgaatgaatgaaaaaaaaaaaaaaaaaaaataggt

SEQ ID NO: 7567 - DNA, 856 bp, Homo sapiens
gttttctttgagcatcatgttggcattcaaaaagtttcagattttggagcattttggattttggactttcagatttgggttctcagcctgtatagtgtttgtcaatggtgaacgtttgtcatttagagtaggacagttctgttgatgtacagaacaatcctgtgtattgctgtcccctgcccaacagatacctgtatgggccttctagtcactgtgatatcaaaacctcccatacatactcaaaatctccccttggagagaagagtgcacaataccacccctattgagaaccattggtttaatggggagtgcaagttaaaggttcaccctgattctactgtttaatacagctattatttttagtcattccctcccaggctttttacacatatatgctttctgttttgatagtgtacataaagtggcaagtattactgggaccatactggtctctagcttcccagtcaatctggggagagcctcagcccacaaggcagggtacctgagcaatgctcacatatgcagatgattttaggacagaaaagtatctttttcatattgagatcctgagaccattttgaaacgggctgtaaaatatagggagaaacttatttgtgaatttcagaggttgatactaggagtataccaggaagagtttggttttcctgtccccaaagttgtattatccctgtgctagtcagatgtatttgaatcttccatatcccactatctctttaaagtgtgcttcaaatggaaaatccagataaacctattagatttgagcacttagctgcttgtatcaggaatgcttgctaaattgtcctttagcctgatttgtaaaaaaaaaaaaaaaaaa

SEQ ID NO: 7568 - DNA, 1835 bp, Homo sapiens
  misc_feature (730)..(730): n is a, c, g, or t
ttttttttttttttttttttttttttttttttttttttttttttttttttttttttttttttttttttttttttttttttttttttttttttttgtcttgcagctctttgtagaggacctagcctttctctactgaactgaaggggtttggtcccatcacccgaagactggcccacctgcccacacaggtgggggcacaggaggtctgggaggccccaggaggtggaagttcagaggcctgcctggccctgtccatcccactggctgaggccaggccggagggccgaccccaggggccctctgtatgcaagccgacgcagacaagggcccagtgcatagttaagacacaaacaccacacagctgtccagagcctccaaagcactgtttatccaggctccatggaaccaagtgcccccagctgcctgccctagtcctcaggggggcactggcactacagtggcctcggcctgagaccctcgatgagccccagcctagcctgctccaaagccactgacacatgcatgtttagcccttggcccatcaagatggggccctgggaatgaactggctgcagaccctcctccatcccacacccccaggggctccatcagtcctggctagctcagcaccatgttaaatagcttccttgcaatctcccttaaataaacccatccccagagcaacctacccaccctgcaccctgaatatattatcctattgggcttatgncttctagactggaggcgctctctcctcttgccctctactccaggggataccatctccctaaaaaaccaggggaggaagttttttttctcaactctggggcagagacaaagggtggcctgggttggagtggaaaagccaggaatagcttcctctgtcccttccctccccagggtacttccttctccttgccctcttagcagcctgggtcaggcgcgacttacccaaggtcacagacccaggacccagagtcatgacccatgtaggaggttaccctggttttgacagcccaaaccagctccagggcaggaggactgaacttaagcctgcctccaccttggcccctgcagttctccaggctcggagtgagctgagggaggttccagctcttgactccactctgtcccggacccctgggactatctcccaggaccctccacccctggtgtctccaggtctctcttgctctggggatactcagacagcaccgggcatggaagcaatggggcccgggacatgggcaagcctgtccctggcccgatcagcatctgggcccaggccaggcctcacacccagtactggccattcttaagggcagggttgggtgtccggcagaactgcagcagctctgggtcaggctggcctcctggagggggcccctggccaggcacagctgtgagcgggatggcctggcctggctccaccttgcgaaaggtctcggtgtcaccagccaggccgttgcggggcttggcagtcaggacctggacgtcatgcttgcccgtcttgttgcgttttcggaggtagaagagcaggggcaggatgagcgccaggagcagaagtaccaggcacatggggatgatgacgctgaacatgttggcctcaaggaagctcaggaagcctcccttggccacagcgggctcagggctggatgccatggggcctggctcgcctgtgggggtgctgctctctggcttccctgcttccgtccgggcggcctcggggacactgagcagggccacgctgtagggccgggcagcattgtaaggctcagtggcaaagtccagggaggccacagcaggcgggacgccctgtgcccacagctccagag

SEQ ID NO: 7569 - DNA, 485 bp, Homo sapiens; identical to SEQ ID NO: 3602

SEQ ID NO: 7570 - DNA, 1869 bp, Homo sapiens
gccctgaggctttattaaattgcgggcctcccttgtgagggggccccctctttgtaccaaggaaaagtctggggtagggcgttaagccttgggggccccctgggaggggattcttttaggagccgggcccccccttttttgttttttttttggagatataaaataacttttatttacataatttatatatatatataactgctttctttagaacaagaaaatttataaatgacatgatattgctttttctgtcaaagacttcttcaagcaagatagtatacatggtcacttttgtttcaaataacatgatggtaaacagtggatattaatatttttgtcatgcctcaaccatttaccaacaattaggcgttcaaatcctcatgttgaccacttgctaagacataagtgttcaggagaaaaagtcaagaaaagataaaaacttttactcatatctcctttaaaatttgtgaaataaatcctttgcaacatcttcttcacatgaatcagacctaacatagttctttccaacatgtaaggtaaatacattgattaactttctcttttccaaaattaggtttaaggatttaacagtaggatactttagctggctgacttgattctctaatacaatgagtctctgtattctttatatagtaagaaattccattttccataaaactagctcattatagattaaaaagaaacagatgttaaagttaaaaactaatattacacaaggataaataatagtttaatcatggcaatctaactcccaagctaacactaagagaatgaaatcttttcagaatatgagttttaaaaacttacaaaaacagggtattcaaatagcaatgtgatttactaccatgatttctgtgacatatcaatcatgaaataaatgcctacttatagacaatttccgctccgaattatatagcctcctctctgacaaagtgttacgccataaatttcactaaaagacaatgaataagaagtgctctaacagcagtagtttcaataaattagcattactgttatatgtgctgagacataattctcttctattaaggaacttaaaaactggccaccattttttcaatatacaaacataattatctagactctaaaatatcttcccaactgaaatactgatcattacataatacagtcaacagttttaacttttaggcacaactcataactttagtgacaaataactcatccatacagatatcagcacctcagggtaagaaaatttggggcctaatgtagggggtcaaactaaaaggccaatccagccacagtccttcattcaagtactgtctatggcttctttcacactgaaattgcagagctgagtagctgccacagagaccatctggcctgcaaacccaaaacagtttgcagaaagtttccaatgcctgagctactatactatcaatccaagaggcttttcaaataaaatcaggataaatttgctgtttgagaagtctaattggaaccactacagatctgcttgggtagataatagaattacacgtataaaaaatcaaatcttgaaattaaaacaaaccttaaattcatactgatgataatcattaactttataaagccttattttctctgtttttaacatcatgattatgttccgtgcttaaagatccaagtgttccttgagaatttaatgggaaaaaactatgaagaaattggctttttaaaaactaatattatgtctgtgggtgtataaaggagattgagctttgtatggaaattttgtctcataaataaagttgagttccccctatcctcatgaaaatcctgagattatccaagaaaagcagaaaaaattacagtacaagtctatatact

SEQ ID NO: 7571 - DNA, 1265 bp, Homo sapiens
atatttttattttaatatcttatgctattattctgtaaacattttaattttagtttcatgagtctttattttttgttacctgcaagttatgttcttcttcattgaatttcatatttgagagacatttgtcttcatgaagcagatttgcactggaaccattgctttactctggttggaaatgccattgttttggggacagacttttaaaatgcccttgtgtctcccagtgaggagccctaagcattgacttctctaccctaaaactgtttgagagagggagagtgggccctggctttctcaagcatgggtcgggggttcagcggggcctctgtcttttgtggtgacccctcaggggtttcattgtttccttctgacttaagcaatagagagagaatttgttttggtactcttcagaggaattgtgctttggctcataacttggccatgttctccatgaattagttctcctatttttttttttaactaccttaaacttaagggaaaagttctcctatcttgatttcactggaatataggctttaggagctctgtaaggctggtatttttgtctgttttatcttctactgtatcgccagtgcctggaacagtgtctggtgcacataataggtgctcaataaaaatgtgttcaatggaaaaacccctcatacctatacctcctccatcctcccccctacccctctccccatttccccttcctacaccatatctcctcccaccccatttaacctggggggggcccttcctaaaaattcccccccggggggcccacctttctttatgtccccccccttttttttttccaacgaggggccccttccttttgggggcctttttttcttaactaaatttcggggcatcgcgcccccccctatatttataacattcgcctgggtgtcgcgcggaaaacccgcgccctcccgggtggcaaccttccgcggggggaacacaccctcttccttttcgcggggggggccaaaaatttcgctggcaaaacccttccccttcacatcaactttctatttccccttcccccgccgaacactcccactaccacttctccctccccgtataacacgcgtgcatatacaaccatatcccctctaatctttcttccccccctttcacaccattttttttttctcctcccccggaagatctttttttgcacattatatcctccctcttgcgccccgccgttgcgcccccttaatgtccgtcggttgactttacatcctcccctaccc

SEQ ID NO: 7572 - DNA, 491 bp, Homo sapiens
tttgaaaatcatacttttcttttttatttcaatttattgttgttgacaactcctcaagacaatataaatgtttttttacatgttgatccccagaaaataggtgcctaaaaaaagttactttaggataatgatttcaggggagtagaaggtgaaaaatcataacccaaagtccagtatggacaaaaccatgaagacatttggaagtagtatttctcattgacaagcaagtaaaaccaagtgcattgcaacagatggcatacaaatcaaatcctgatgcagcacggtatggggaactatttaaattaatctactagaagtctattgaacagttagaacataactttaatgaatatattatcatatccagttctgtatagtaaacctacatttttcatgtcctagctgacaacccaaactatcttagtacccttcaatattgctttgcaattgtggacacaatggattccattgaaagataaatattatttgac

SEQ ID NO: 7573 - DNA, 1110 bp, Homo sapiens
ttttttttttttttttttttttttttttttttttttttatattacagttttattattatttaaaaattttatattaacaaaatgagatgggatctgcctatgttgcccaggctggtcttcaactcctgggctcaatctcctcggcctccgaaagtgtgattacaggcgtgagccaccgcacccggcccatattacagtttcatagtgtttttgattactcgtggtaggagaaatgtgtcttctttgcacttggggtctcaacgtctcagtcctgccctatgccccgagaccccaagaggctttcccaaggtcaggcagggaatccgcagagaggcagggctggactccagcatcctgactccccagttcgtgctctgtgctgcagagacctgttgcgtaacactgagtaactgtggattgtctaaccttttatgaaatttccagctggtcttttgctaccggccagcagtccagttggtgggagtgatgatgccggtcttctgggacgtccagtggacagattttccccaggtttctggatgcagccccaacaagcaaaagtgctacactcctgcaccgggaacactgacacaggggtcacgaaaatgctaaaacaagacgtgcaagaattgttgcgctccgcacacgtaacaagggctctgcctccccctcccccaatcttcgccctggtggccaggccctgggctccgccccttccccaccagaccgggggaggggtcctcctcggcatggaggtaggggatgctaggctgctggagacgcccgcagaaagaggcgggatggcggggcggatgctggcggcccgggtctggccacctgggtcagctgcacgcccccgccccgggctggccggacctcgtagcccaggtcccaccacgccgtgaagtttgcggaaagttttgcagttgcttccccgcccgcgccagcgggggagttgtgacgcagcgtctggggatcctggccgggacagaagagagggaaggcgaggcggggagagactgggaaacagagcagcaagagaaagggcgcacgctggggtcctcctggacccggcgtgtcctcctctccgccacccctttctctccctcc

SEQ ID NO: 7574 - DNA, 2356 bp, Homo sapiens; identical to SEQ ID NO: 5805
  misc_feature (164)..(164): n is a, c, g, or t
  misc_feature (2247)..(2261): n is a, c, g, or t

SEQ ID NO: 7575 - DNA, 787 bp, Homo sapiens
tcagccaggcccggcttcgcgttctaggacaggaggcaagagcattttatcaagggcctgccagaataccacgtggtgttgtccagtgcgagtagatgccagtgggccattttttgtcatatggcttgcactatcccatcacgagcagcaggaggaagagagatttggatggctcagaggactgggtgtactacagaatttctcacgaggagaaggacctgttttttaacttgacggtcaatcaaggatttctttccaatagctacatcatggagaagagatatgggaacctctcccatgttaagatgatggcttcctctgcccccctctgccatctcagtggcacggttctacagcagggcaccagagttgggacggcagccctcagtgcctgccatggactgactggatttttccaactaccacatggagactttttcattgaacccgtgaagaagcatccactggttgagggagggtaccacccgcacatcgtttacaggaggcagaaagttccagaaaccaaggagccaacctgtggattaaagggtattgtgactcacatgtcctcctgggttgaagaatctgttttgttcttttggtagttttattaaaacatgacctattcttactcaagtctcttatctcctctgtattcttttttttttaatatcttcatgacattcaaatctcttctgtattctcttgccagaaagtgtacattctttttgcttgtataaaccctttcacttgtcagttctctctcccgtagggatcctctagatcg

SEQ ID NO: 7576 - DNA, 1954 bp, Homo sapiens
  misc_feature (23)..(23): n is a, c, g, or t
  misc_feature (27)..(27): n is a, c, g, or t
  misc_feature (36)..(37): n is a, c, g, or t
  misc_feature (40)..(41): n is a, c, g, or t
  misc_feature (43)..(43): n is a, c, g, or t
  misc_feature (50)..(51): n is a, c, g, or t
  misc_feature (54)..(54): n is a, c, g, or t
  misc_feature (57)..(57): n is a, c, g, or t
  misc_feature (61)..(100): n is a, c, g, or t
  misc_feature (1582)..(1605): n is a, c, g, or t
tggttctttttgctagggggttnatcnccatagacnnccnntnattgaannccnttnggannnnnnnnnnnnnnnnnnnnnnnnnnnnnnnnnnnnnnnncattatggccggggtcctctcagtggccagagaacagaaagaaaatctgactgtgcacgagcgaagggtgacaccgggcgtgcagcaccgacctgaaggcacctcttcgggggagcccgaaatttgaagattctctttcctgtcggagactacaaaccaaataaatagggttttatgttactctggtagtgaaccgatggtggaaccagtttgtgaatttgccctggccagacaggctaatgttcctcatctctagcagtgttcacggaagcgacgagcacgggcgcctgcttagaaggacgctgatgcgctacgtcaatctcacctccctgctcatctttcgctcggtgagcactgctgtgtacaaaagatttcccacaatggaccacgtggttgaagcagaaagaactggcatgaaacccattctgccttcaagttttgagatgcagagcttttagttcctctgctaatagagcctcgtttgaatactctgcttgaaaggcaaaagacatctgcctcaacttcaatcaaggaaaaatagagcaactgtacagcaggcagaatctctatgatgactggaattttgtctatcaatggatgtaattaatcctttggctcaagggcaataaaattttgtcttaaagtagcagatcctgctccatcaaagcacaactcaattgggagtaaatgcaaacatgtatctatattgagagatagattttactctgattagaaagatgaaggagggatttggggataaacaatatgaaaattgctgagcagagctgagccagccagaagaaaaagcgatagcaagagaaactgtaggcagatgcaacggcaggataaaatagctatgccaggggtgtgatggggcctgaggagagcatggcatggagacagacacgtgcagggaaccaagtggtgggaggacaagcccactcagagtgttgccgaactgtagcaaatcagtaactataattagcatagcctcagcaatgacaataatgatcatattctgaaaaaaatattggtctctgcttaaaatggcttgaagtcctgatgagggtgacattccatttcataacaaatacttttggaatggacttgaccaacaacctagagattttctttcagttgaccaactttgatttccaaaggtggagttacttttgtgaacccccaaaatctgagacaggtctcagttaatttagaaagtttattttgccagggttgaggatgtgcacccgtgacacagcctcaggtggtcctgatgacatgtgcccaaagcggtcagaacagtttggttttatgcattgtaggaagacatgagacatcgatcaacatatgtaagataaacattggttcagtctggaaaagccagagatgactcaaagtggggagggggcttccgggtcataggtaggtaagagacaaatggttgcattcttctgggtttctgattagtctctccaaaggagnnnnnnnnnnnnnnnnnnnnnnnngtgaacggagcaatgactttaatagaatgggaggcatgtatgccgtaagcagttcccaacttgacttttccctttagcttagtgattttggggacccaagatattttcctttcacactttggataagtaagatgtgtgaccctgcaaggaataacaaaaattattctgcttatatattcttagaggatacattaatgtctcagtgattgtcattcatctttcacagcgcccagcaaaatactcaataaatttgtgctaaaaacaaaaaaaaaaaaaaaaaaaaaaaaaaaaaaaaaaaaaaaaaaaaaaaaaaaaaaaaaaaaaaaaaaaaaaaaaaaaaaacctcggg

SEQ ID NO: 7577 - DNA, 4345 bp, Homo sapiens
  misc_feature (9)..(9): n is a, c, g, or t
  misc_feature (13)..(13): n is a, c, g, or t
  misc_feature (16)..(16): n is a, c, g, or t
  misc_feature (18)..(18): n is a, c, g, or t
  misc_feature (974)..(997): n is a, c, g, or t
  misc_feature (1334)..(1384): n is a, c, g, or t
  misc_feature (1873)..(1893): n is a, c, g, or t
  misc_feature (2471)..(2589): n is a, c, g, or t
  misc_feature (3054)..(3072): n is a, c, g, or t
atggcagangganggntntccctgggctgagctgagcacctcctccctgagacagcagcggtctaacccccggcgcgggagggacccagccagggggctgtcctagtagattccggcattgcctccaacccgctgtggcggggacgcagagggcgggtcgcgctcgagggtcaggtaggagagtgacccggccctggtccaggcccatccctgcccgctgcggctctggaacccgttcgcggtctctcaggcctgttttccgtgcctcacgccctgcttttcgcctccttcagcgctgtctgctagctgcttttcctgctctctctccctggaggcgaacccttgtgctcgagatggcagccaccctgctcatggctgggtcccaggcacctgtgacgtttgaagatatggccatgtatctcacccgggaagaatggagacctctggacgctgcacagagggacctttaccgggatgttatgcaggagaattatggaaatgttgtctcactagattttgagatcaggagtgagaacgaggtaaatcccaagcaagagattagtgaagatgtacaatttgggactacatctgaaagacctgctgagaatgctgaggaaaatcctgaaagtgaagagggctttgaaagcggagataggtcagaaagacaatggggagatttaacagcagaagagtgggtaagctatcctctccaaccagtcactgatctacttgtccacaaagaagtccacacaggcatccgctatcatatatgttctcattgtggaaaggccttcagtcagatctcagaccttaatcgacatcagaagacccacactggagacagaccctataaatgttatgaatgtggaaaaggcttcagtcgcagctcacaccttattcagcatcaaagaacacatactggggagaggccttatgactgtaacgagtgtgggaaaagttttggaagaagttcnnnnnnnnnnnnnnnnnnnnnnnnccacactggagagaagcctcacaaatgtaatgagtgtggaaaaagtttctgccgtctctctcacctaatccaacaccaaaggacccacagtggtgagaaaccctatgagtgtgaggagtgtgggaaaagcttcagccggagctctcacctagctcagcaccagaggacccacacgggtgagaaaccttatgaatgtaacgaatgtggccgaggcttcagtgagagatctgatctcatcaaacactatcgagtccacacaggggagaggccctacaagtgtgatgagtgtgggaagaacttcagtcagaactccgaccttgtgcgtcatcgcagagcnnnnnnnnnnnnnnnnnnnnnnnnnnnnnnnnnnnnnnnnnnnnnnnnnnnagccgcatctcacacttggttcagcaccagagaactcacactggagagaagccatatgaatgcaatgcttgtgggaaaagcttcagccggagctctcatctcatcacacaccagaaaattcacactggagagaagccttatgagtgtaatgagtgttggcgaagctttggtgaaaggtcagatctaattaaacatcagagaacccacacaggggagaagccctacgagtgtgtgcagtgtgggaaaggtttcacccagagctccaacctcatcacacatcaaagagttcacacgggagagaaaccttatgaatgtaccgaatgtgagaagagtttcagcaggagctcagctcttattaaacataagagagttcatacggactaagctgtaattatgatggctgagaaatgattcatttgaagatacaattttatttgatatcaatgaacgccctcaagactgagctgcttttatcatactctcctagtnnnnnnnnnnnnnnnnnnnnntcagagatgacaagccatttgaaattctgaccctcagctttgggaatgttatctcctccaaaatggtgatttttattcactcaatgggttacttcattaaaagcagccccacaagtaactggaaatctgaagaccaggggacaaatgctggtgaatgcctaggcctggaaatggagtaaatctttcaatgttattttctcccatccttggcccaaggaactatgctaagtgaaacgtgggactgtaatagggtggtaatggctgctttggaaaaaggcaactagagactctgcctaaattgccacacctattcacacaccatagtagttgggcacacacatcttcccttccaaagggctttttccttgagttgctcatgcatttgtatcttttccatcttcctgagggcaagattttgcacgatgaaggcaatgattgtaacttttctccttctcattgtttctaattagctcctttaaagcttgcatctttgtgaaggctaactgaagatacggttggaaaggaaaaatgagacacaggtttggggaccaaggacccatcaatgatggtgactttannnnnnnnnnnnnnnnnnnnnnnnnnnnnnnnnnnnnnnnnnnnnnnnnnnnnnnnnnnnnnnnnnnnnnnnnnnnnnnnnnnnnnnnnnnnnnnnnnnnnnnnnnnnnnnnnnnnnnngttaagtgtaaggagcaagtggaattgagtccttcagggaaggaaccacagagtcccttcccaaggaatgtaggtcgtttctgtgttctttcccttctaatctttaagatcaactcttcctatcctgctaactctaagatttgataagggccacatcccagtgtttatcttagcttgcatcagggcatgtgtatgtacagtaatgtgtattcctgtggtttttctaatagaaactgaatttacagagacttagcatgttcttgggtgatgtgagtcatgtgacagaagtacagacataactccaatgtgagaaatgtcctttttttcattatggaaaataatttaaacactagtgctttagtgtgcactctcctgtaaggtctgtctttgtacagagctaagcacttgtttgtatgtgtttgtcaattgtggaagataatgaccagacaaataggtcgattgtcnnnnnnnnnnnnnnnnnnnatcttctatggtaatgaagaactctttggcttagtcagaaggaattaacgaacctcggtaggaatgtatttccatcctcccaccctacagatataagaggttaaaataacagttcgcccaatttaagcccagtagtgtcagttttcctaatctcagtccaggtaggaattaagaaatatctcaagtgttgatgctatccaagcatgttggggtggaagggaattggtgcccagaaaatgggactggagtgaggaatatcttttcttttgagagtacccccagtttatttctactgtgctttattgctactgttctttattgtgaatgttgtaacattttaaaaatgttttgccatagctttttaggacttggtgttaaaggagccagtggtctctctgggtgggtactataatgagttattgtgacccacagctgtgtgggaccacatcacttgttaataacacaacctttaaagtaacccatcttccaggggggttccttcatgttgccactcctttttaaggacaaactcaggcaaggagcatgtttttttgttatttacaaaatctagcagactgtgggtatccatattttaattgtcgggtgacacatgttcttggtaactaaactcaaatatgtcttttctcatatatgttgctgatggttttaataaatgtcaaagttctcctgttgcttctgtgagccactatgggtatcagcttgggagtggccatagatgaccgcatttccatgacctaactgtatttcacccccttttccttccctactgttcttgccccaccccaaccagttcctgctgctgcttttggcttcttggaggtgaagggcttaaaacaaggcttctaagcacccagctatctccatacatgaacaatctagctgggaaacttaaaggacaagggccacaccagctgtctcctctttctgccaattgttgcccgtttgctgtgttgaactttgtatagaactcatgcatcagactcccttcactaatgctttttgcatgccttctgctcccaagtccctggctgcctctgcacatcccgtgaacactttgtgcctgttttctatggttgtggagaattaatgaacaaatcaatatgtagaacagttttccttatggtattggtcacagttatcctagtgtttgtattattctaacaatattctataattaaaaatataatttttaaagtcaaaaaaaaaaaaaaaaaaaaaaaaaaaaaaaaaaaaaaaaaaaaaaaaaaaaaaa

SEQ ID NO: 7578 - DNA, 3480 bp, Homo sapiens
  misc_feature (230)..(247): n is a, c, g, or t
  misc_feature (3202)..(3202): n is a, c, g, or t
  misc_feature (3228)..(3228): n is a, c, g, or t
  misc_feature (3241)..(3242): n is a, c, g, or t
  misc_feature (3278)..(3278): n is a, c, g, or t
  misc_feature (3290)..(3290): n is a, c, g, or t
  misc_feature (3347)..(3347): n is a, c, g, or t
gtgggaccgctgaccgcgcggctgctccgctctccccgctccaagcgccgatctgggcacccgccaccagcatggacgctcgccgcgtgccgcagaaagatctcagagtaaagaagaacttaaagaaattcagatatgtgaagttgatttccatggaaacctcgtcatcctctgatgacagttgtgacagctttgcttctgataattttgcaaacacgaggctgcagtcnnnnnnnnnnnnnnnnnngacccgcagccagtgcaggcactctggacctctcagggtggcgatgaagtttccagcgcggagtaccaggggagcaaccaacaaaaaagcagagtcccgccagccctcagagaattctgtgactgattccaactccgattcagaagatgaaagtggaatgaattttttggagaaaagggctttaaatataaagcaaaacaaagcaatgcttgcaaaactcatgtctgaattagaaagcttccctggctcgttccgtggaagacatcccctcccaggctccgactcagtaagtaccagttcttgtttatatacagtagtgttttgggcacacctaaggtcgatctgtgttgtatttaaaaatctaatttctttatttgtgtggccttctagacaaacgaaggggacctagaggaaaccccctgacagatctctggatgatcctccttgaatcctgggcagtttggtctctccttgctgtgctcctgtggcactaaactccttttgattggttctttctttccttcccagctagactaagcccctcatgggcaggtaatgaagattgaaaacttttttctgttctccagtgtgagcacattcctcctacatggtagatgtgcaatagatgtttttaaaattggagaatgaaaataaaagaagaaaatcacaatttcttatcaagttgtagcttggtatcatacacaattgcattctgaggaattaaggtggtacaacttagggagatttggtgtgtctgctgtgatagaaaagatttctttttcctggctttccctgaggaaaggaaagatggaaagagggaagccatacagatatccctctgttttgcagtgtagaaactgaatgtgtttctacagggtcaagagacattagagaaattttttttttttagaacagaagatcatttcttacatcttcattaagtaaaagaataaatagctcatctctcaagttgaaagaaactgggcttggtattattacaaaagcaaaattaaaatggccatataggttttaggctcattttgccatgcattatgcaaaggacaaagaaaaagaaaaaatagagctctctttacttaaaacatccttaaggagaagctatgaattccccaaagtactacttctctttattatggaataaatggattcccttatacgtgctttgtttagcaatcaaggagaccgcgaaggcgtacattcccgggtgttgcttccaggagaaaccctgaacggagagctcgtcctcttaccaggtcaggtccccggatccttcgggttcccttgacgctctacccatggaggaggaggaggaagaggataagtacatgttggtgagaaagaggaagaccgtggatggctacatgaatgaagatgacctgcccagaagccgtcgctccagatcatccgtgacccttccgcatataattcgcccagtggaagaaattacagaggaggagttggagaacgtctgcagcaattctcgagagagatatataaccgttcactgaactggcattgcccgccttgtcgaggaatctgcaactgcagtttctgccggcagcgagatggacggtgtgcgactggggtccttgtgtatttagccaaatatcatggctttgggaatgtgcatgcctacttgaaaagcctgaaacaggaatttgaaatgcaagcataatatctggaaaatttgctgcctgccttctacttctcaaatctttcttgtaaaagtttccaattttttcactgaaacctgagttaaaaatcttgatgatcagcctgtttcataagaaactccaatcaagttaatcttagcagacatgtgtttctggagcatcacagaaggtatattgctagttacactttgccctcctgcagtttcttctctgctcccaacccccatctcatagcatccccctctatttccaatgctcctctccaaccgcttagtttctgaatttcttttaaattacagttttatgaaagcatattttatttacttggtgttgaaatagccctcataaaacctaagcacttggaaacacaataatagtattaactaactagatctattgaatttcagagaagagccttctaacttgtttacacaaaaacgagtatgatttagcactcatactagttgaaatttttaatagaatcaaggcacaaaagtcttaaaaccatgtggaaaaattaggtaattattgcagattgatgtctctcaatcccatgtattgcgcttatgttacaagttgttgtcacagttgagacttaatttctcctaatttcttctgcccgaagggtaagtggtgcgtccagcttacacgatcataattcaaaggttggtgggcaatgtaatacttaattaaaataatgatggaagagctatctggagattatgagtaagctgatttgaattttcagtataaaactttagtataattgtagtttgcaaagtttatttcagttcacatgtaaggtattgcaaataaattcttggacaattttgtatggaaacttgatattaaaaactagtctgtggttctttgcagtttcttgtaaatttataaaccaggcacaaggttcaagtttagattttaagcacttttataacaatgataagtgcctttttggagatgtaacttttagcagtttgttaacctgacatctctgccagtctagtttctgggcaggtttcctgtgtcagtattccccctcctctttgcattaatcaaggtatttggtagaggtggaatctaagtgtttgtatgtccaatttacttgcatatgtaaaccattgctgtgccattcaatgtttgatgcataattggaccttgaatcgataagtgtaaatacagcttttgatctgtaatgcttttatacaaaagtttattttaataataaaatgtttgttccaaaaaaaaaaaaaaaaagggcggnccgctctagaggtatcccctcgaggnggccccaagcttnnacgcgtacccccagctttcccttggtacaaagtggntccccctatagntggaggtcggtatttataaaagctaggccgcctgggccggtccgtttttaaccacgntcgctgaacctgggggaacacctggcctaaccctggggggaattccttttgttgaaaggggacacctcttaacctttcctggggggggggggggaacacaaatattggggaaccaaaaactaaaccttttaca

SEQ ID NO: 7579 - DNA, 529 bp, Homo sapiens
  misc_feature (513)..(513): n is a, c, g, or t
tttttttttttttttttactctagaaattgtgttttaatttccaggttctaagcaagctgttttgtcactataattgttaaagtttaacatatccattgtcaaaggtatgaccaaaatgaataaaaatatttaagcccaaaaagtttaagggaactctgagacataattgatgttcaagtaccatttttcaaatgttaagggctattggcatctgccaacattcaaaacaaacatatatatcttgagagtcatcaaaataaactttacttttttggtacttcccttgtaagatcccattttaaatgtaaggacattgaaataaaagccttcaatttaagatagtattgcaattcctttttagtcatgtaactagataattcttatatatattccatgtcttatgttggttcctacacattaatcctgcaagcctttgacattagtgtattctgcaaagtattcaatgacaatatcaccagcgtccacctctagacatacgtacgactacattntgcttctaatctctca

SEQ ID NO: 7580 - DNA, 2086 bp, Homo sapiens
  misc_feature (1901)..(1903): n is a, c, g, or t
  misc_feature (2041)..(2041): n is a, c, g, or t
atatgatctagaggatccctactactacgagagcaaatcaactacagtggtagtggaggccgaagcggcgggaacagctacggctcaggcggggcatcctacaacccaggtcacacgggggctacggcggaggttctggggggggctcctcataccaaggcaaacaaggaggctactcacagtcgaactacaactccccggggtccggccagaactacaggggccctcccagctcctaccagtcctcacaagggccagcagcagtcctacaaccagagcccctacagcaactatggccctccacagggcaagcagaaaggctataaccatggacaaggcagctactcctactcgaactcctacaactctcccgggggcgggggcggatccgactacaactacgagagcaaattcaactacagtggtagtggaggccgaagcggcgggaacagctacggctcaggcggggcatcctacaacccagggtcacacgggggctacggcggaggttctgggggcggctcctcataccaaggcaaacaaggaggctactcacagtcgaactacaactccccggggtccggccagaactacagtggccctcccagctcctaccagtcctcacaaggcggctatggcagaaacgcagaccacagcatgaactaccagtacagataagcccccgcggggcggagatttctaccttctgcacttactccccatcagaagatcgagttttatgcatcacagttaacatgtcagctggccctccaggcccccgcccccatcccgtccacgttgctgtgtcgtgaggtgcagcgggtcaccctgtggcccgtcctgtgacccatatttagccgtgtttgggactccgtgtcttcaatggtttgttagttgccattacaactttgtctgggtagagtttttgagtttttgcagttcagtatccctctgtctattcacacttcgtgttagtggtaactcagtttgtctttaaatagttacagaagggatacgtcatttgttaatgcttttgtgaagtgagttaaacgagctttctgtattttaatgctttagtgtttcagttttataagtgaagattttattttaaaaaccagtgggaaagagtggggggtttctttttatgtctgggtcattcaggcagtacatctgaattaagctgaatgtagacaaataaagaaaaacaaaactgcgcccgtcttaggcctgggtgtctgacccaccagcagtgcaatgggcaggtttccccactctattcctgctcttgggaaagcagcgtgggccatcaggatggtccctggtccttagagagggtccagttcaggcttctagacattttactcatgctcagcgaaggctggttcctggtcccctgggctgtgtagacccggtgtcccaccaggctccaggctcccaccatctacagaggggcttacagcgcccattctggtcttggggaacccatcacaaaataggctttttctgctccccgattctggtgtagttctaagtacacagtgatgtcctctgtaggggcgtgcctgtggtggaacataacgcagttacaaaaagaaagggcaggtgaggcctgggtaaccccagccatggaccgtcagtggctggagggagcttcgtgtctgtgctggagctgcagcctgctcgccatctggaggctcatgggagtgggggattgggggctctcatacccaggaaatttccctagagcgtgattctcccttctgaggcaatctttgctcccaagggcacacttgcaatgtttttggaggatgttgtcacagcttagttgccgggtgcctcctggggatctggtgggatacatggccaaggatgctgttcaagcatactatactgcccaaaannncagtgggccaatagccagggaacctgcgcctattcaaaattattccgggggtaatggaaaggttggaaatcccccaacccccttaagaaacaaagccccttttcttcaagctttccaaccccttggtcccccgggggnaaaggggaatagataacgcaaagcttctctcggggttttttccca

SEQ ID NO: 7581 - DNA, 846 bp, Homo sapiens
  misc_feature (295)..(295): n is a, c, g, or t
  misc_feature (297)..(297): n is a, c, g, or t
  misc_feature (359)..(359): n is a, c, g, or t
  misc_feature (363)..(363): n is a, c, g, or t
ctcaaacttctggccccaagtgatctgcccgccatggcctcccagagtgctgggattacaggtgtgagccactgcgcccagcttattaatagacatttaatataaagaagtaaataaactttttattgaggtataatttatatacagtaagtgcacagataatgtgtatgcagttagatgaatagtgacaaatacacctcacatcagtggtcccaatcctttgggaggccgaggtagatggattacttgaggcctggagttcgagaccagcctgggcaacatggcaaaaccccancnctacaaaaaaatacaaaaattagccaggtgtggtggtgtgtgcctgtggtcccagccccccnggangctgaggtgagaggattgcttgagcctggttaatccaaggctgcagagtctcactttttcacccgctgcactctgacctgggtgacagagtgaaaccctgtcttaaaaaacaaaacaaaatccaaatatttacacctgtgtcatcaccacccagatcattgtttagaatatttccgccaccttagaaagttttgtcatgccttttttttcagtcagtccctccccttcactcactgcaagaccaccactgttgtgacttttagcatctaaatgtagctttggaatcatgtagtatgtactctcatgtctctgaaattcatccatgttgttgcataattcagtagttcactactttttaatttctgattagtatttcattgtatgggtgtactgtaatttgtttaaccattcacctgctgtttaatcttttgagctgtatgcatttggctattatgaataaagctgctttgaacattcctataa

SEQ ID NO: 7582 - DNA, 2350 bp, Homo sapiens
ttttttttcaaattctcttttattgctttatgtccctgactcatgcaggccaaagggtgaggaggagtaatagccaacaagagcgtcctgcagaaagaaacaggctgcgtgggtccggaggagcttgaaaggaagaacccgaccaaagggcaggagacccggctctccaggtcgcggaggcgtgggtgcccagccaggcggagtgcggggcggggcctctcgggccgcaaggtggggcctcctgggccgggaggtgggaggtgagctccgccagcccagcccactgcagacaggttacccaggacctcaaggtgtgctgcgtcaccccgcccgcgctgcgctgattggttcctccagggagcccccgccccctcagctgtaaccgggccggcttcagtgtcgccgccatctttgttgatgtgtcagctccgcaggggtttggggaaacggccgctgagtgaggcatcggctgtgtttctcaccgcggtcttttcctcccactcttggctggttggaccccgctatggaaaagttggcccctgagccagagctccagcagccttgttagggcgtggcctgaggcttggataagtgggatgtaaaacgaagatcaggagcagatttgaagaattacaaagtgaattggtgccagtcagcatgtcagagacagaccacatagcctctacttcctctgataaaaatgttgggaaaacacctgaattaaaggaagactcatgcaacttgttttctggcaatgaaagcagcaaattagaaaatgagtccaaactattgtcattaaacactgataaaactttatgtcaacctaatgagcataataatcgaattgaagcccaggaaaattatattccagatcatggtggaggtgaggattcttgtgccaaaacagacacaggctcagaaaattctgaacaaatagctaattttcctagtggaaattttgctaaacatatttcaaaaacaaatgaaacagaacagaaagtaacacaaatattggtggaattaaggtcatctacatttccagaatcagctaatgaaaagacttattcagaaagcccctatgatacagactgcaccaagaaatttatttcaaaaataaagagcgtttcagcatcagaggatttgttggaagaaatagaatctgagctcttatctacggagtttgcagaacatcgagtaccaaatggaatgaataagggagaacatgcattagttctgtttgaaaagtgtgtgcaagataaatatttgcagcaggaacatatcataaaaaagtaaaaaaattataaatttaggttattttttttccctcacaggcacagggattcgagataaaattctttaaaggaaaataccattttgttcatttttacttgcacattagaatcatgcacatagtagttgaacaataaatgtatagttgctgaatgtgtgagcaaatgtcgagtttttcagatatctgagttcaatatgttaaatagtgtaaatgtattaacgtgctagaaatttttatagacaactcaaaatttttcacttttgaaagaatgtagaagtatattgtcaaaactaagagaaactcaaaaggaaataacaagtcataaaattccacaactttttcttaaaatctgcattctaaattcattggtttaaaacattaaaatttagagaacagaataattgattatcgttcagtaaataataatacagttttggatatgtgaagttctgttttcatgatagtttaaaatttaccatcttaaccatttttatgtgtacgtttcagtagtgttattatatattcacactgttggacaaccaatctgcagaactttttcactttgcaaatctgaaacactgtattcgttaaacaacactatttccacttgccctcagtccctggcaaccaccattctactttctgttgctgagtttgactactcatgatacctcatgtaggtgaaatcatatacttttcatttcatgactggcttatttcatttagcctaatgtcctcatttatccatgttgtaacatgtcagaatttcatttctttttaaggctcaataatattgcattgtatgtatataccacattttgtttattcatccattaatggacatctgggttccttctgctttttggctgttgttaataatgctactgtgaacttgggtttgcaagtatctcttcaagactccaaggcccttcttgatattacccccaaacaaatgcctgctgttgctattcatatccttactgtaatactatattatgtgaataaactgtatgcttttgtacttgaaaaaaaaaaaaaaaaaaaaaaaaaaaaaaaaaa

SEQ ID NO: 7583 - DNA, 2776 bp, Homo sapiens
atttattttgatgtcggcggggtgtgcagatgaccctttcctcacgccgtctccgatattggtgttcaccaaaacatctttatccagtagtgcaaaatgtcatgctaaccttgtcttagtttcacgtctttaattctgaaacttgaaacaaaaacaatgcatcagtgggccatggagacttcttcttctgtgtatgggatactgtgtcttttattcttctattctggtatgtcctccctgatttctagtcatttttgaattatttatagacagtaaacattgcccaatatattatgaaaatgtgtttccactttattgttgcctctgaaaacattttgaacagaagcttttataagcaaggcttgaatttttcttttttatgttgtcttaggtttgtgtgagtttccacctttgtgtaacacatttttccttttaacagaaccattttatcactgtctctcttccttcttgggaaaaagaaaaccatctttttcttttcatttgcattacttacaactatgaattgatttatagagtgctaaaatatttgtaaaatcgagcagattcttctgtgtgcctttttctcctggtgatttatttaaatggatttctaaggtgttttcccgtcagtattgatttgttttggtgagtacgattttatgtgcgctatttgtctctctgtttctgaactatagcaacatttttgtgcattctctcttactctccactgaatgatgaacccttgtgaacttccaattgttttctcttcatttcttaatgtttctgagaagaccgacatattatttgtaagtgattttaaaatttgtctccttttctatgttttttcgttgtcttcagagtgtcttcagagtgcattcgtatttttgttgaattggctttgctagagaacacatgatggctttaagtatgagtgaagagagtagacattttttattcctgatttcaaggtaaaaacctaaagaggttcacctgtaaataaaataaattgtctttacaaaaccagatactcattccaagaagatctctctattctagtatacttttttttctaaacatacaatagtataggttctcatactgtgagacttcttatttctttatacacaatatatttgaaaagtcattggttttttagtgattactaatgtactgttacatggttttgaaaagtgttggattcaaagtttccttcatttaagcctcttttttctcccttccccatataaaaagttgatgatggccaggaatagaggttcacacatataatcccagcactttgggaggctgagatgggagcatcttttgagcccaggagttcaagaccagcctgggcaacatagcaaaaccccctctctacaatgaaatgaaaaattagccaggcttgttggcacatacctgctgtcccacctgcttgggaggctgaggcaggaggattgcttgaggccaggaggcggagcctgcagtgagccgtggtcacaccactgcactccagcctgggtgacagaggaagaccctgtctcaaaacaaaacaaaaatggttcctcgactttagttaggatttgaaaagcttagaactggaaggcagcctctgaaattatcaagaatgtcacagcagtttgtggaacacacctgggtgggtagacccactttttagacactctctagcccaaatctgatcacagtcattcttcctcacctcttagggtctccctcacagaaggtgttgggggccttggacgagatgttgatgggatgggaataaacaggagcaaataatgtgcaggcgaagttggagttcctgctcagtctgggaggagaattgatttatgaatttctttctttctctctttgtatctatctcttctttctctctctctctctctctccccccagccaccttctgatctctaatccattcatgtgagagaagagtgatgtgaaaatggtcagcaatttgctttttctgatgagatcctggtgagagtcatgttcaataaagtatttagtcacgtggggctccagtgatttctctgtttacaagctcattccttcctcattttctcagaactttggtgttaacagcctgtttcctatttgtaggggctgactttgacttagcagatgcctttcgtgatggaggaaataacgacccagcacctcttaattcacccaagctgaagccaaatgcgaaccctgagcagcctggattcattggggatgactttgacttagcagatgccttacatgacaaaggaaactacgagccagcaccactgaacccacccaaaccaaagccaaatccaaaccccaagcagcctgattccaccggggatgactttgatttcacagatgtttcttcatggtgaacgaaacagggagttgcctcgattctgatgtgtttgcttcggtgctctgtgtattgtattcatcccactcttcaattcataaactctggagattcttcaattcactgggcaaaccatatgcctaagtctatcctctgatggaggctcgtacatgcaaaatccaatagcaacctgggaagatttcagtcaagacccaagaggaggctggcatcaggctctcggtcaccgatcttcacattcaggtttcctgatgcactttgcgactctttgggcaacctctggactccttgttcccagggtccacatttagttttatctttactgcattgcttttatgaaaaagaataaaattggatgaaacagaaaaaaaaaaaaaaaaaaaaataggt

SEQ ID NO: 7584 - DNA, 2709 bp, Homo sapiens
caggttggaaggcacgaggcaggcggcgaggagagcggtgccttgcagggatgctgcgggcgggagcaccaaccggggacttaccccgggcgggagaagtccacaccgggaccaccatcatggcagtggagtttgacgggggcgttgtgatgggttctgattcccgagtgtctgcaggcgaggcggtggtgaaccgagtgtttgacaagctgtccccgctgcacgagcgcatctactgtgcactctctggttcagctgctgatgcccaagccgtggccgacatggccgcctaccagctggagctccatgggatagaactggaggaacctccacttgttttggctgctgcaaatgtggtgagaaatatcagctataaatatcgagaggacttgtctgcacatctcatggtagctggctgggaccaacgtgaaggaggtcaggtatatggaaccctgggaggaatgctgactcgacagccttttgccattggtggctccggcagcacctttatctatggttatgtggatgcagcatataagccaggcatgtctcccgaggagtgcaggcgcttcaccacagacgctattgctctggccatgagccgggatggctcaagcgggggtgtcatctacctggtcactattacagctgccggtgtggaccatcgagtcatcttgggcaatgaactgccaaaattctatgatgagtgaaccttccccagacttctctttcttattttgtaataaactctctagggccaaaaaaaggtatggtcattgggaaatgagtgctcagggagatggagcttaggggaggtgggtgcttccctcctagatgtcagcatacactctttcttcttttgtcccaggtctaaaacatctttcctagagaaaacaaaagggactaaactagaaatataaagagccctatacatgacaggtgatcacgtactgaatgattttgtagtacaaacaataaaaattctcattccgcatcatcatgcggtccatgatgatgaggccgcaaaaaaaaaaaaaaaaaaaaatcctttaaggctaagactctctctctccctcgtgccgaattcggcacgaggtgtaatcccagctactcgggaggctgagacagaagaatcacttgagcccaggaggcggaggttgcggtgagcagagattgcgccattgcactccagcctgggcgacaaagcgagactccatctcaaaaaaaacaaaaaaattagcatttacggaattctgaaattttgggctattaaatttctacatcatctaagtgccctcttggcaatctttcacatcctctcatggcatctgatccagaaggctcaaacctgatctgagtactagtgtgttcctcctactcacttctgtttctattaactaataagtgtagtaatgaaagccagtattagggacaaattttacatgactttcttctcaaacctggacctttattgaacctctgcctccctttttcattagtatgaaagtatgtatcttaaagggttgctctacgaattaaatggatcagtaaatataaagaaagcgcctagcaaagtgcctagtacaaaataaacgcccaactgttattgttactattgttttaaattctagtttccttaccccttaacatacattttcagttatacaaaagttgaacgtttccctggagattgccaaaattctctgaacggtttcaagagatctgtcctattcttcacctacacacaaaaaagtactaatcatcacacacaggctacctaagccacctgaccttacctcccattagctgtccctgtaccatctaactaaaatgtacagatacatacttgtggccaggcacggtggctcacgcctgtaatcacagcactttgggaggccaaggcaggcggatcacctgaggtcaggagtttcagactagtctggccaacatggagaaaccccgtttctactaaaaatgcaaaaattagctgggcttggtggtgcacacctgtagtgccagctactcgcgagactgaggcaggagaattgcttgaacccgggaggcgggggttgcagtgagccgagatccggccactacactccagcctgggaaacagagcgatactctgtctcaaaaaaacagaaagacaaaaaaacggatacatactggaaccctgaaaactttttcagtagcatttagaccttctctcatatacagcattgtaaaatccattgctttgcttttagctgcactatgtgccccaatatcatcaaatggcatttggccttctctttacagactgaaaaggcacattacagatcttaaatatgctagtagtagatcaatgggcagtgtgttattcagaatacagtattctgtgatggttttctaatctcagtgacagtaggtggttaaattaaatgtttatggccaggtgcggtggctcacacctataatcccagcactttgggaggccaagccaaggtgggcagatcttttaaggtcaggagttcaagatcagcctgaccaatatggtgaaagcctgtctccactgaaaatacaaaaaattagctgggtgtggtggcgcacccctgtaatctcagctacccgggaggtagagtttgcagtgagcagagattgtgccactgcactccagtctggacgacagagtgagactccatctcaaaaataaaaaaaaaaaaaaaaaaa

SEQ ID NO: 7585 - DNA, 3321 bp, Homo sapiens
accagcatttctccccgagatggcgggtctgacggcggcggccccgcggcccggagtcctcctgctcctgctgtccatcctccacccctctcggcctggaggggtccctggggccattcctggtggagttcctggaggagtcttttatccaggggctggtctcggagcccttggaggaggagcgctggggcctggaggcaaacctcttaagccagttcccggagggcttgcgggtgctggccttggggcagggctcggcgccttccccgcagttacctttccgggggctctggtgcctggtggagtggctgacgctgctgcagcctataaagctgctaaggctggcgctgggcttggtggtgtcccaggagttggtggcttaggagtgtctgcagccccttctgtgccaggtgcggtggttcctcagcctggagccggagtgaagcctgggaaagtgccgggtgtggggctgccaggtgtatacccaggtggcgtgctcccaggagctcggttccccggtgtgggggtgctccctggagttcccactggagcaggagttaagcccaaggctccaggtgtaggtggagcttttgctggaatcccaggagttggaccctttgggggaccgcaacctggagtcccactggggtatcccatcaaggcccccaagctgcctggtggctatggactgccctacaccacagggaaactgccctatggctatgggcccggaggagtggctggtgcagcgggcaaggctggttacccaacagggacaggggttggcccccaggcagcagcagcagcggcagctaaagcagcagcaaagttcggtgctggagcagccggagtcctccctggtgttggaggggctggtgttcctggcgtgcctggggcaattcctggaattggaggcatcgcaggcgttgggactccagctgcagctgcagctgcagcagcagccgctaaggcagccaagtatggagctgctgcaggcttagtgcctggtgggccaggctttggcccgggagtagttggtgtcccaggagctggcgttccaggtgttggtgtcccaggagctgggattccagttgtcccaggtgctgggatcccaggtgctgcggttccaggggttgtgtcaccagaagcagctgctaaggcagctgcaaaggcagccaaatacggggccaggcccggagtcggagttggaggcattcctacttacggggttggagctgggggctttcccggctttggtgtcggagtcggaggtatccctggagtcgcaggtgtccctggtgtcggaggtgttcccggagtcggaggtgtcccgggagttggcatttcccccgaagctagatgctgaagctgccgccaaggcttccaagtttgggttagttcctggtgtcggcgtggctcctggagttggcgtggctcctggtgtcggtgtggctcctggagttggcttggctcctggagtaggcgtggctcctggagttggtgtggctcctggcgttggcgtggctcccggcattggccctggtggagttgcagctgcagcaaaatccgctgccaaggtggctgccaaagcccagctccgagctgcagctgggcttggtgctggcatccctggacttggagttggtgtcggcgtccctggacttggagttggtgctggtgttcctggacttggagttggtgctggtgttcctggcttcggggcagtacctggagccctggctgccgctaaagcagccaaatatggagcagcagtgcctggggtccttggagggctcggggctctcggtggagtaggcatcccaggcggtgtggtgggagccggacccgccgccgccgctgccgcagccaaagctgctgccaaagccgcccagtttggcctagtgggagccgctgggctcggaggactcggagtcggagggcttggagttccaggtgttgggggccttggaggtatacctccagctgcagccgctaaagcagctaaatacggagtggcagcaagacctggcttcggattgtctcccattttcccaggtggggcctgcctggggaaagcttgtggccggaagagaaaatgagcttcctaggacccctgactcacgacctcatcaacgttggtgctactgcttggtggagaatgtaaaccctttgtaaccccatcccatgcccctccgactccccaccccaggagggaacgggcaggccgggcggccttgcagatccacagggcaaggaaacaagaggggagcggccaagtgccccgaccaggaggccccctacttcagaggcaagggccatgtggtcctggccccccaccccatcccttcccacctaggagctccccctccacacagcctccatctccaggggaacttggtgctacacgctggtgctcttatcttcctggggggagggaggagggaagggtggcccctcggggaaccccctacctggggctcctctaaagatggtgcagacacttcctgggcagtcccagctccccctgcccaccaggacccaccgttggctgccatccagttggtacccaagcacctgaagcctcaaagctggattcgctctagcatccctcctctcctgggtccacttggccgtctcctccccaccgatcgctgttccccacatctggggcgcttttgggttggaaaaccaccccacactgggaatagccaccttgcccttgtagaatccatccgcccatccgtccattcatccatcggtccgtccatccatgtccccagttgaccgcccggcaccactagctggctgggtgcacccaccatcaacctggttgacctgtcatggccgcctgtgccctgcctccacccccatcctacactcccccagggcgtgcggggctgtgcagactggggtgccaggcatctcctccccacccggggtgtccccacatgcagtactgtataccccccatccctccctcggtccactgaacttcagagcagttcccattcctgccccgcccatctttttgtgtctcgctgtgatagatcaataaatattttattttttgtcctggatatttggggattatttttgattgttgatattctcttttggttttattgttgtggttcattgaaaaaaaaagataatttttttttctgatccggggagctgtatccccagtagaaaaaacattttaatcactctaatataactctggatgaaacacacctttttttttaataagaaaagagaattaactgcttcagaaatgactaataaatgaaaaacctttaaaggaaaaaaaaaaaaaaaaaa

SEQ ID NO: 7586 - DNA, 3934 bp, Homo sapiens
  misc_feature (361)..(399): n is a, c, g, or t
gaggcgaggctaggtgagccgtgggaagaaaagagggagcagctagggcgcgggtctccctcctcccggagtttggaacggctgaagttcaccttccagcccctagcgccgttcgcgccgctaggcctggcttctgaggcggttgcggtgctcggtcgccgcctaggcggggcagggtgcgagcaggggcttcgggccacgcttctcttggcgacaggattttgctgtgaagtccgtccgggaaacggaggaaaaaaagagttgcgggaggctgtcggctaataacggttcttgatacatatttgccagacttcaagatttcagaaaaggggtgaaagagaagatggcgactttgagtcannnnnnnnnnnnnnnnnnnnnnnnnnnnnnnnnnnnnnntgattaaaccacagaaggtgacctgctgagaaaagtggtacaaatactgggaaaaacctgctcttctgcgttaagtgggagacaatgtcacaagttaaaagctcttattcctatgatgccccctcggatttcatcaatttttcatccttggatgatgaaggagatactcaaaacatagattcatggtttgaggagaaggccaatttggagaataagttactggggaagaatggaactggagggcttttcaggggcaaaactcctttgagaaaggctaatcttcagcaagctattgtcacacctttgaaaccagttgacaacacttactacaaagaggcagaaaaagaaaatcttgtggaacaatccattccgtcaaatgcttgttcttccctggaagttgaggcagccatatcaagaaaaactccagcccagcctcagagaagatctcttaggctttctgctcagaaggatttggaacagaaagaaaagcatcatgtaaaaatgaaagccaagagatgtgccactcctgtaatcatcgatgaaattctaccctctaagaaaatgaaagtttctaacaacaaaaagaagccagaggaagaaggcagtgctcatcaagatactgctgaaaagaatgcatcttccccagagaaagccaagggtagacatactgtgccttgtatgccacctgcaaagcagaagtttctaaaaagtactgaggagcaagagctggagaagagtatgaaaatgcagcaagaggtggtggagatgcggaaaaagaatgaagaattcaagaaacttgctctggctggaatagggcaacctgtgaagaaatcagtgagccaggtcaccaaatcagttgacttccacttccgcacagatgagcgaatcaaacaacatcctaagaaccaggaggaatataaggaagtgaactttacatctgaactacgaaagcatccttcatctcctgcccgagtgactaagggatgtaccattgttaagcctttcaacctgtcccaaggaaagaaaagaacatttgatgaaacagtttctacatatgtgccccttgcacagcaagttgaagacttccataaacgaacccctaacagatatcatttgaggagcaagaaggatgatattaagacagggtcttgctccgtcacccaggctggagtgcagtggcgtgatcatggctcacttcagtgtccaactcctgggctcaagcaatcctcctgccttagccttccaaacctgttaccctccaaatcttctgtgaccaagatttgcagagacccacagactcctgtactgcaaaccaaacaccgtgcacgggctgtgacctgcaaaagtacagcagagctggaggctgaggagctcgagaaattgcaacaatacaaattcaaagcacgtgaacttgatcccagaatacttgaaggtgggcccatcttgcccaagaaaccacctgtgaaaccacccaccgagcctattggctttgatttggaaattgagaaaagaatccaggagcgagaatcaaagaagaaaacagaggatgaacactttgaatttcattccagaccttgccctactaagattttggaagatgttgtgggtgttcctgaaaagaaggtacttccaatcaccgtccccaagtcaccagcctttgcattgaagaacagaattcgaatgcccaccaaagaagatgaggaagaggacgaaccggtagtgataaaagctcaacctgtgccacattatggggtgccttttaagccccaaatcccagaggcaagaactgtggaaatatgccctttctcgtttgattctcgagacaaagaacgtcagttacagaaggagaagaaaataaaagaactgcagaaaggggaggtgcccaagttcaaggcacttcccttgcctcattttgacaccattaacctgccagagaagaaggtaaagaatgtgacccagattgaacctttctgcttggagactgacagaagaggtgctctgaaggcacagacttggaagcaccagctggaagaagaactgagacagcagaaagaagcagcttgtttcaaggctcgtccaaacaccgtcatctctcaggagccctttgttcccaagaaagagaagaaatcagttgctgagggcctttctggttctctagttcaggaaccttttcagctggctactgagaagagagccaaagagcggcaggagctggagaagagaatggctgaggtagaagcccagaaagcccagcagttggaggaggccagactacaggaggaagagcagaaaaaagaggagctggccaggctacggagagaactggtgcataaggcaaatccaatacgcaagtaccagggtctggagataaagtcaagtgaccagcctctgactgtgcctgtatctcccaaattctccactcgattccactgctaaactcagctgtgagctgcggataccgcccggcaatgggacctgctcttaacctcaaacctaggaccgtcttgctttgtcattgggcatggagagaacccatttctccagacttttacctacccgtgcctgagaaagcatacttgacaactgtggactccagttttgttgagaattgttttcttacattactaaggctaataatgagatgtaactcatgaatgtctcgattagactccatgtagttacttcctttaaaccatcagccggccttttatatgggtcttcactctgactagaatttagtctctgtgtcagcacagtgtaatctctattgctattgccccttacgactctcaccctctccccactttttttaaaaattttaaccagaaaataaagatagttaaatcctaagatagagattaagtcatggtttaaatgaggaacaatcagtaaatcagattctgtcctcttctctgcataccgtgaatttatagttaaggatccctttgctgtgagggtagaaaacctcaccaactgcaccagtgaggaagaagactgcgtggattcatggggagcctcacagcagccacgcagcaggctctgggtggggctgccgttaaggcacgttctttccttactggtgctgataacaacagggaaccgtgcagtgtgcattttaagacctggcctggaataaatacgttttgtctttccctcaaaaaaaaaaaaaaaaaaaaaaaaaaaaacaaaaaaacaagatgtgtgtgggggcgcacgacgggcgcccacgagaaaaagttttttcaaacaccatgcgggggggcggacgggggcacccaggaggaggagagacgaaacaggggggacaaaagggtgctcccagggaggaggacaccgggcgaaaaaaagaaaaaagcaggggcgagaggaatctctctccacaagataaaacaaaaacgagcgcgggggggaacacaacgaaggctgggtgaaaaagaaaacacaccgaaggagggggataggagaggggacaaaaaaggggggactaaacaaaaggagggataccaagagacacgcgaaacacaaattacccccc

SEQ ID NO: 7587 - DNA, 680 bp, Homo sapiens
  misc_feature (352)..(352): n is a, c, g, or t
  misc_feature (361)..(361): n is a, c, g, or t
  misc_feature (372)..(374): n is a, c, g, or t
aagcggccgcttttttttttttttttttttttaatttaatgtacatccagtcacaaagtctagccaaactgcaaatttgaaccatctgtgcttggagcttcttggaaaagttcaccagaaagtccccttgaagttatgtatggagaataagctaaactggggcttcagcttgcagccctgtgattggccacagaggaaacttgcactacacatttatggtgtgaataccatatttgcaccaggatgatttaccccatctataggcatgcaaccactgagcctagcagcttccacttgccttggtaaaactgttcctggttgtcttagtgccttgaattctctactctggctntcagtctgncagatcacaannnctagtcctgggccaattagcagaaccatgagcaactggcacaatgaacgctataaacgtattttagatgatcaattcagttcatctgtagtgtagacagaagtcacttgtgggtcttaaggagtcccacaaaaattagcccatatattgtaactagcgataagtgttatttatcttaagtagtgtcatctgttcattcattctacacatatttaatgagcaccaattatgtaccaggcatcatgctcaggaaaaacagtgataatcaaaacagatgtgaagctcgttcatgacatttattgtccat

SEQ ID NO: 7588 - DNA, 3758 bp, Homo sapiens
  misc_feature (806)..(818): n is a, c, g, or t
  misc_feature (2230)..(2248): n is a, c, g, or t
agctgggagaaaaaagccttggagctcccccaccctctaacctataacctcatttctgggaccccagtggggcttagttgggggcaggttcgcatgatagtctgtgtctccgcagcggccattctccacttttcgggtggagagctgatggtgaccggtccctttgctacagctggcatttttgccacctaccttcctgatcacatgacattgtggcggggcttcctgaatgaggtcagtggtccaggatgagtacccctccccctgccctccacccctcaggacagagccagcagggagtccctccagatagacaggacaagaactctggatggagactgtactgagacgtctctctgctggtgggcttgggtctgggccactgccgatgtcctgtggcttggggaggggcccaggtgagctgccacagcatctgctcctcaggagtggctgaccaggatgctccagctgtgtctcttcaccatcacggaccaggagaacaacccagcactgccaggaacacacgcgctggtgataagcatcctcgtggtcatcatcagggtgtcccatggcataaacacaggatatgccatcaatccatcccgggacccgccccccagcatcttcaccttcattgctggctggggcaaacaggtcttcaggtactgcccctgcccaggcccattcctttgagtttttctgtggagctcctgtgtgttgaggggtggggggtgatgtgaggggcagcacaggagggtcctgcagagcccccaggtggcctggggagcaggagtgagtcccaacannnnnnnnnnnnnagtacagatacagatcctgcacctgcactgagtatcaaccctgtccctgaatcgggctgaggctgaccagggccctgggttgggggtgtttcctggggtagcctggggatgactcctctgctcaaccagtcttcgcccaaggtggatgagggtgctgtcctgggcatcagccccctcagcaggcctctgcctcttgcctgcagcgatggggagaactggtggtgggtgccagtggtggcaccacttctgggtgcctctctaggtggcatcatctacctggtcttcattggctccaccatcccacgggagcccctgaaattggaggactctgtggcgtatgaagaccacgggataaccgtattgcccaagatgggatctcatgaacccatgatctctcccctcaccctcatctccgtgagccttgccaacagatcttcagtccactctgccccacccttacatgaatccatggccctagagcacttctaagcagagattatttgtgatcccatcccttccccaataaagcaaagcttgtcccacagcagtacccccacttcctgggggcctcctgtggttgggcttccctcctgggttcttccaggagctctagggctatgtcttagcccaaggtgtagaggtgaggtgcctcaagtctttcatgccctgggaactggggtgccccagggggagaatggggaagagctgacctgcgccctcagtaggaacaaggtgagatgaaagaatgacagaaacagaatgagggattttcaggcaagggggaaggaagggcggttttggtgaaaggaccgtagctgactggtggggggctggctttggaaataatttgaggggatcctgagattggactctagactctcccctggttcttcccttccccgagttctggccggttcttggaccagacaaggcaaggcccaagaaggtagatcagaattttttagccttttttcattagtgccttccctagtattcttctagattttttttttcttaatcacatgaaattttaataccacagatatactatatatctgtttatgttctgtatatgttctgtgctttatacgtaaaaaagagtaagattttttttcacctccccttttaagaatcagttttaattccattgagaatgcttgttatagattgaaggctggtaaggggttgggctcctctttcttcttcctggtgccagagtgctcccacatgaaggaataggaaaggaagatgcaaagagggaaatccttcgaacacatgaagacacaggaagaggcctcataggcctccaagggctccagggaagcagctgcagaggttgggtggggtggggggccaggatccactgaccctggggccaggcaggaaacactctattgcctggggctcagaannnnnnnnnnnnnnnnnnncctgtcattgctcatgcattttgcctttcaacaattattgtgcacctactgtgtgcaggccctgtctggacactggggatgcgcagtggatgcactgggctctgcctttgagggctgcagtttaatgggcgacaggtaattataaggaagaaggtgagtgcagagtgggaggcttggaggcagtggggcttggggtgggagagctcacatccagcctctgagccaaggccaggaggcttcccagaggaggagacagagcagggtattgtggtggggggtgtcctttttggggctgggtgctgcactttacagtttgaggggatgggcagaggaggctgggcttcgttctggaggtggggacatggtaaggtgaggtttagaaagcacacctgagccacagtgtgtaggatgctggaaatggtggagatgggcctgcaaagagagtgctgggaagtgatgacccaggagcagcagccaggcacctaacaatgggtcagcaccatgggcgtggagacgagggccgggattgatcaatacccgagaagtacaatgtacaggacttgggttccatttggatggagtgggtgagggagagggaggagtcagaaatggcttccagtttccagcttgggcctggggattagagatgtccccactgagagtagggcacaagtgaggaaatggtttggagagaaagatgataagttacatcatggatgtgctgagtctgagttgcctatgggacttggaatggggggtggaaaaaggtgtgtgatcttgagcaagatattcaactcttctgggccttggtcttctcatttgtaaaatgatgataagaatattacttcccatttgtgttgctgtgaatattaagtgcgctaccacatgtaaaatgttgagaatcgtttctagctcagagtaagtgctcaataaacacagttatgccttttatatggtctggagctcagaagtggaagacagggttttgtgaagtcatggctttgtggatgtagctagagtgtggagtaatgacaggagggtcgggggcacggcacaaggtaggtggtcaagagacactggacacaacccaaatgtccatccacaggggaacagatacatacactgctgtgcaattgcacatagtagaatcctctacaatagcaaaaattaaggcacaacagacacctgcaacaacacagaaaaattctggaggcataaaaagtaatacagtagctgggcgtggtggttcacacctgtaatcccagcactttgggaggccaaggtgggtggatcacgaggtcaagagatcgagaccatcctggccaacatggtgaaaccctgtctctactaaaaatacaataattagctgggtgttatggcacacaactgtagtcccagctattcgggaggttgaggcgggagaactgcttgaacctgggaggcggaggttgcagtgagccaagatcgcatcactgcattccagcctggtgacagagcaagactcggtcat

SEQ ID NO: 7589 - DNA, 1662 bp, Homo sapiens
tgcctacgcctgctcttgcgctgtcctgttaatggcgggcagtagccgctgaggggattgcagataaccgcttcccgcacggggaaagtctaccctgcctgccactttctgctcgccgtcagcgccggagctcgccagcatgtctgtggtaccgcccaatcgctcgcagaccggctggccccggggggtcactcagttcggcaacaagtacatccagcagacgaagcccctcaccctggagcgcaccatcaacctgtaccctcttaccaattatacttttggtacaaaagagcccctctacgagaaggacagctctgttgcagccagatttcagcgcatgagggaagaatttgataaaattggaatgaggaggactgtagaaggggttctgattgtacatgagcaccggctaccccatgtgttactgctgcagctgggaacaactttcttcaaactacctggtggtgaacttaacccaggagaagatgaagttgaaggactaaaacgcttaatgacagagatactgggtcgtcaggatggagttttgcaagactgggtcattgacgattgcattggtaactggtggagaccaaattttgaacctcctcagtatccatatattcctgcacatattacaaagcctaaggaacataagaagttgtttctggttcagcttcaagaaaaagccttgtttgcagtccctaaaaattacaagctggtagctgcaccattgtttgaattgtatgacaatgcaccaggatatggacccatcatttctagtctccctcagctgttgagcaggttcaattttatttacaactgaattcctgcgcagtggagaagtaaaagaagccgcttgtctctgtgagcacagctatatacagtgtagaataaatgtggtagaaaagtttttttggttttatctcttttgcgatccctaaattgccacctttctattgtttgaatagtaaaattaatatgaagaactagatagtggtgtaaacaaatgtgataatgtttatttactttcggttctgctcatacttttttgtacaacattaaagaaaatggactttttttattttaatttctcattaaacttctaaaattcttataggtgaggatcatttttccccccaccttaggagtggtgaatgttgcaagcacaatgacaggtttaagtcagtcaagtttattggaccctgtgctttgataccattctgtgggcacatactccaagattgtacttagatttttgtgatgaagagcttccattacttctgaaaactatatttatctgagtgagtccaaggtgcaactcctaaatgaattgtgttgcagagaactcccagtataattcactgagccagtacattttataaccatccaggcttgggtttgcaagcaacagagctttaaacataccgggaaactatttaaaagtgcgtcgatccagctagtcataggaacttgcataagacgagaactccatgtagagcccagaaatttcttccacataaggggggcctcaccaactcgggccggggggaagaaggggggaacctaaaagcgcgggaacaacacagggtctgggagaaggagttcccaaaggggtagaagggcggaccgcggagccacaccatctcaaccgcgcggggggcc

SEQ ID NO: 7590 - DNA, 1968 bp, Homo sapiens
ataaaaaccgtcctcgggcgcggcggaggagaagccgagctgagcggatcctcacacgactgtgatccgattctttccagcggcttctgcaaccaagcgggtcttacccccggtcctccgcgtctccagtcctcgcacctggaaccccaacgtccccgagagtccccgaatccccgctcccaggctacctaagaggatgagcggtgctccgacggccggggcagccctgatgctctgcgccgccaccgccgtgctactgagcgctcagggcggacccgtgcagtccaagtcgccgcgctttgcgtcctgggacgagatgaatgtcctggcgcacggactcctgcagctcggccaggggctgcgcgaacacgcggagcgcacccgcagtcagctgagcgcgctggagcggcgcctgagcgcgtgcgggtccgcctgtcagggaaccgaggggtccaccgacctcccgttagcccctgagagccgggtggaccctgaggtccttcacagcctgcagacacaactcaaggctcagaacagcaggatccagcaactcttccacaaggtggcccagcagcagcggcacctggagaagcagcacctgcgaattcagcatctgcaaagccagtttggcctcctggaccacaagcacctagaccatgaggtggccaagcctgcccgaagaaagaggctgcccgagatggcccagccagttgacccggctcacaatgtcagccgcctgcaccggctgcccagggattgccaggagctgttccaggttggggagaggcagagtggactatttgaaatccagcctcaggggtctccgccatttttggtgaactgcaagatgacctcagatggaggctggacagtaattcagaggcgccacgatggctcagtggacttcaaccggccctgggaagcctacaaggcggggtttggggatccccacggcgagttctggctgggtctggagaaggtgcatagcatcacgggggaccgcaacagccgcctggccgtgcagctgcgggactgggatggcaacgccgagttgctgcagttctccgtgcacctgggtggcgaggacacggcctatagcctgcagctcactgcacccgtggccggccagctgggcgccaccaccgtcccacccagcggcctctccgtacccttctccacttgggaccaggatcacgacctccgcagggacaagaactgcgccaagagcctctctggaggctggtggtttggcacctgcagccattccaacctcaacggccagtacttccgctccatcccacagcagcggcagaagcttaagaagggaatcttctggaagacctggcggggccgctactacccgctgcaggccaccaccatgttgatccagcccatggcagcagaggcagcctcctagcgtcctggctgggcctggtcccaggcccacgaaagacggtgactcttggctctgcccgaggatgtggccgttccctgcctgggcaggggctccaaggaggggccatctggaaacttgtggacagagaagaagaccacgactggagaagccccctttctgagtgcaggggggctgcatgcgttgcctcctgagatcgaggctgcaggatatgctcagactctagaggcgtggaccaaggggcatggagcttcactccttgctggccagggagttggggactcagagggaccacttggggccagccagactggcctcaatggcggactcagtcacattgactgacggggaccagggcttgtgtgggtcgagagcgccctcatggtgctggtgctgttgtgtgtaggtcccctggggacacaagcaggcgccaatggtatctgggcggagctcacagagttcttggaataaaagcaacctcagaacacttaaaaaaaaaaaaaaaaaaaaaaaaaaaaaaaaaaaaaaaaaaaaaaaaaaaaaaaaaaaaaaaa

SEQ ID NO: 7591 - DNA, 2553 bp, Homo sapiens
  misc_feature (559)..(590): n is a, c, g, or t
gctgacctgatggacgccgacagcctcctgctgtctctggagctggcgtccggcagtgggcagggcctcagcccggaccgtcgggcctcgctgctcacgtctcttatgctggttaagcgcgactaccgctatgatcgggttctcttctggggccgcatccttggcctcgtcgccgattactacatcgcgcagggcctgagtgaggaccagctcgcaccgcgcaagacgctctatagcctgaactgcacagagtggagcctcttgccccctgccacagaggagatggtggcgcagtcgtctgtggtgaagggccgcttcatgggggacccatcatacgaatatgaacacactgagctgcagaaggtgaatgaaggtgaaaaagtctttgaagaagaaatagtgattgacaaggctgtggccatcatcccccgaggcgccctcttcaagaccccttttggacccacccatgtcaatcggacctttgaaggactgtccttgtctgaggccaagaagctcagctcctacttccatttcagggagcctgttgagctaaagaatnnnnnnnnnnnnnnnnnnnnnnnnnnnnnnnngacctggacccctccctggatttcatggactccttggagcatgacattcccaaagggtctgaggcagttgttcagggtgacttcacgtggcttctgagcaggtgtggttttggttggccctgttcctgggactcctgctctgtgtccatgagggtcctggagcatccagatggagaggggcaatgccctggtggtgctgcgcagcctgctctggccgggcctcaccttctaccatgctccccgcaccaagaactatggctacgtctacgtgggcactggcgagaagaacatggacttgcccttcatgctatagaatgggagccagcctggatgtttttaaacagagtctaaacatgattttcttaagcttcagtgaacttggcctgcctgttctgtcctatcttcttaactccacctccgtctggttccagattctgaaaggcccactgagccagggagctcatttctaaaccaagtggcagaggggttggaatgtgctaatgaaagagattctagacaacgatgggtggaaatggctgtgggagaaggtgacaaccagggcccctttgaggaacgcagtttcttggattcacacgagagcggcaagtgtgtcaggcagcccaccttggctccctgcagctctcccacagtaaggagctcacagctgtcatgaagaggatgggacctgtttggcccatgaattcaattgactcattggccccatcacaagagatcagtgactcaatgctcagcacccagctggcaatgtgcccaggaccccctgcacttcccaagcagtgagcgcacacccaatgggtaagcccatgaacccagtttatgacactgcgttgggcaaaactcctgtccccagcactgagcatggcctaagccccatagcagctggcaagggacccaactgccctgcctgcctctagctcccagcattgctactgtgcaggccaagggtactgaagttagtcccactgtcccctgtccatgcatgttggagggaccaggccatcgtggtggggtgggacaggagtatagttgtggccaagggcttgtgagtgggcctcctactccccagcacaggtgcaggaggaactctggaagcactgctctctgtcagtgatacagcttccaaggtgttcttgagtagcagacattgtccctcagaaggggtgaccccacgggcatgcgcaccctgttccagcgggggccttttttgtagatgggcttgacggagccaggagcccagcgcgtcaggtacctgtggagggagaacaaagaggtgcctgtgagggctgggggcccaagctggacgtgggagagtggagcactacctcctcaggccaggccacggttgggcaagcaaatcctttcaccagtttccctttcctgaagtgcagggattttcctgggagtaactgctgagcgtcctgtaaacagatgggctgggctcttgctgccgcaagcctgtgtggccaggttcaggcagcccagggccacaagctcccttgatctttgtaaatgtcaatgttggtgtgtgtttgctgaggaaaaggtggcgaagaggctgcctgaagagcagatcattcctctctggcctcagccatggggcgagaagagctgatgtaaggctctggaggaacccattgctcttccccatttggctcactcagctaccccaaccttcagggaactccccagggtactataactggtataagacccctgcccctcacccaacctgtgatgggaatcaaggggtaagggcccgtgggcgcagccctagcctaggaaggttcctgtaaataggaggggggtggggaaagatggctgccgcccatggacctttggcctcctttggggatggccagggccctgatagttcccagaaaagtggctcatgccggctaggattgggttttactctgtccagaataaaacttggatcctgtcc

SEQ ID NO: 7592 - DNA, 2282 bp, Homo sapiens
attggtgaggcaaggaggaggcggagtgactcggcggcaattagctgtgtgtagttgcccgggactaggagcttaagtgaagaggtacgccttgttcggtggaaatcagccgtagccatgagtttctgccggggctagccctagagtacggagcaggcggacttttcggttccccgccccgccaggtggcggggcctactaggcctccgggcatccccggtctcaagtaggcctcatctgccggcaagggcgcccgaaacgcgggaggcgccatgtcgctggttgcttacgccagcagcgatgagagcgagccggatgaggctgagcccgagccggaggaagaggaggcggtggctcctacatctgggcccgctttagggggcttgttcgcttctctccctgcgcccaagggtccggccttgctgcctccgccccctcagatgctggcgccagcctttcccccgccgctgttgcttcccccacccaccggagaccccaggcttcagcctcctccccccttgcccttcggcctgggaggcttccccccacctccaggcgtgagcccggctgaagcggcgggagttggggagggactgggattggggttgccctcgccccgaggccctggcctcaatctgccccctccaattggcggtgccggtcccccgctggggcttcccaagccaaagaagaggaaagagcccgtgaagatcgcggcgccggagttgcataagggagattcagattctgaggaagatgaacccacaaagaagaaaactatccttcagggatccagtgaggggactggtttgtctgccttgcttccccaacctaaaaacctgactgtgaaagagactaacaggttgctcctgccccatgccttctcccgcaaaccctcggatggctcccctgatactaagccctccagactggcttctaagaccaagacttcctctcttgcccctgttgtgggcaccacaaccaccactccgtcgccctctgctatcaaggctgctgccaagagtgctgccctgcaggtgacaaagcagatcacgcaggaagaagacgacagtgatgaggaagtagcccccgaaaactttttctccctccctgaaaaggctgagccacctggagttgagccatacccttaccccatccccactgtccctgaagagctgcctccaggcacggaaccagagccggctttccaggacgatgcagccaatgccccccttgaattcaagatctccacaaagttgatttcttctctcccttggatgcctaagcctggggacgactacagctaacaatcagttttccacatatggcgatgccaatgccgctggtgcttattatcaggattattacagtggtggctactatcctgcacaggacccggccctggtccccccccaggaaattgccccagatgcctccttcatcgatgacgaagcatttaagcggctgcagggcaagaggaaccgagggagagaagaaatcacctttgtggagatcaaaggtgatgaccagctcagtggggcccagcaatggatgactaagtcattgacagaagagaaaaccatgaagtcattcagcaaaaagaaaggtgagcagccaacaggccagcagcggcggaaacaccagatcacatatcttattcatcaggccaaggagcgggagctggaactgaagaacacctggtcagagaacaagctcagccgccgtcagacccaagccaaatatggattctagggctctggaactgattgctcccaggatctcctgccagcccagctggcctggcccccagcttcacctctgggaccccagctgctctaagcccaggatctctttccccaaggacccagccctcgcctctgcgagaatgaacatatttgatagatttttcttaacaagttagaaaattcagctcctttctgtcctggagctagcaaagacttgtgtgatgcctccgaaggggctctgagttctggggtgggagttttgctctctgtcaggtgtgataaaatgttgaaccctccccaccaccactttttttttttttaaaccagggatgtctgttgaaataaaacattcagtctgacaaaaaaaaaaaaaaaaaaaaaaaaaaaaaaaaaaaacgaaatcaaagcgggcggggcgacaaaaaagttccaccgggggggggcccaatttacggcggcacccagtttttcttggcaaaaagggggggcccaaaagaggggctattaaaacaagagcaggggcggtgttacacaccg

SEQ ID NO: 7593 - DNA, 553 bp, Homo sapiens
aacgcgctcatagcctccattgctttccacagggtctaccgcacagcaggcaccccatacaaatgtgaggtaaaaccataacatgaccagaagaaaatgaacgcgaatacctttgtgacttatggtatggctccttaaacaaaatttttctttttcttttttttgagacggagtctagctctgttgcccaagctgaagcgcagtggtgccatctcggctcacttgcaacctctgcctcccgggtttaagcgattttcctgcctcggcctcccgagtagctgggatgacagcaggcagagcacacagagacacctctgtatgtgggtgcccagagggatgtgcctgagaacagcaaggcagctctacgcctgtggactggcaaccaccagagagtgggaaaggccaagtgtgggcagaggtgggtgtacagcaccctttactggatatactggtggaaacagactgggcaggcctctgtgcacaactaggcagtcattaaatcataaagcatgcaagtgccctacgatgacccagcagcttcattctgggctta

SEQ ID NO: 7594 - DNA, 1383 bp, Homo sapiens
tacaacatgcacccgcttttgccatttgccgtttcttgcgacacacgtatgtagatcagtttgatcccaagatcccggcacgaggctgggcggagggcaggagcatccagttggagttgacaacaggaggcagaggcatcatggagggtccccggggatggctggtgctctgtgtgctggccatatcgctggcctctatggtgaccgaggacttgtgccgagcaccagacgggaagaaaggggaggcaggaagacctggcagacgggggcggccaggcctcaagggggagcaaggggagccgggggcccctggcatccggacaggcatccaaggccttaaaggagaccagggggaacctgggccctctggaaaccccggcaaggtgggctacccagggcccagcggccccctcggggcccgtggcatcccgggaattaaaggcaccaagggcagcccaggaaacatcaaggaccagccgaggccagccttctccgccattcggcggaaccccccaatggggggcaacgtggtcatccttcgacacggtcatcaccaaccaggaagaaccgtaccagaaccactccggccgattcgtctgcactgtacccggctactactacttcaccttccaggtgctgtcccagtgggaaatctgcctgtccatcgtctcctcctcaaggggccaggtccgacgctccctgggcttctgtgacaccaccaacaaggggctcttccaggtggtgtcagggggcatggtgcttcagctgcagcagggtgaccaggtctgggttgaaaaagaccccaaaaagggtcacatttaccagggctctgaggccgacagcgtcttcagcggcttcctcatcttcccatctgcctgagccagggaaggaccccctcccccacccacctctctggcttccatgctccgcctgtaaaatgggggcgctattgcttcagctgctgaagggagggggctggctctgagagccccaggactggctgccccgtgacacatgctctaagaagctcgtttcttagacctcttcctggaataaacatctgtgtctgtgtctgctgaaaaaaaaaaaaaaaaaaaaaaaaaaaaaaaaaccgagtaccaaaattatccttccatgagtcgtaaactttacacataccacagttaccaggtacaaagtgaacccataaaccaaaatcttaactaactaccctaaaacaccattactactcatttaaacaacgtctctacccaattcacaacacctttataaaacatttccacacacacaagatcaccacaccaaaaccccttaaacctcccctcatcccatgtcaccccaatcaattatacaaacacaaacaaaacgcccttaacaccaact

SEQ ID NO: 7595 - DNA, 1516 bp, Homo sapiens
  misc_feature (1466)..(1466): n is a, c, g, or t
ccggcagtaactcacggcgaattgtagacgaggcagaggactttttagctgctcactggccccgcttgtctggccgactcatccgcccgcgacccctaatcccctctgcctgccccaagatgctgaagccagccctggagccccgagggggcttctccttcgagaactgccaaagaaatgcatcattggaacgcgtcctcccggggctcaaggtccctcacgcacgcaagaccgggaccaccatcgcgggcctggtgttccaagacggggtcattctgggcgccgatacgcgagccactaacgattcggtcgtggcggacaagagctgcgagaagatccacttcatcgcccccaaaatctactgctgtggggctggagtagccgcggacgccgagatgaccacacggatggtggcgtccaagatggagctacacgcgttatctacgggccgcgagccccgcgtggccacggtcactcgcatcctgcgccagacgctcttcaggtaccagggccacgtgggtgcatcgctgatcgtgggcggcgtagacctgactggaccgcagctctacggtgtgcatccccatggctcctacagccgtctgcccttcacagccctgggctctggtcaggacgcggccctggcggtgctagaagaccggttccagccgaacatgacgctggaggctgctcaggggctgctggtggaagccgtcaccgccgggatcttgggtgacctgggctccgggggcaatgtggacgcatgtgtgatcacaaagactggcgccaagctgctgcggacactgagctcacccacagagcccgtgaagaggtctggccgctaccactttgtgcctggaaccacagctgtcctgacccagacagtgaagccactaaccctggagctagtggaggaaactgtgcaggctatggaggtggagtaagctgaggcttagagcttggaacaagggggaataaacccagaaaatacagttaaaaaaaaaaaaaaaaaaaatatacgtctcacacgtaaatcacaatcagtaaggttctccttaacacccgtaatctcatcccatcggataatgaactatcaatctacactcctctaccttaaactcattccatcatcctatcatcgcttttatctaccgacaatacggtgagcctcaccacgcatcagcatgtgtacgccctgcccgagagcgtattggccactagctccttatacttccttgttcgtacctcggctcccctataccatccctcatacattcaaacatacatctcatcgtcacgcgtcgttgaacttgagtgctactcccccttccgtcggaggaaactcgcctctgccagatcatctacgttccttcaccgatctgtaaacaactatagccagtcttacgcgcatctcgctctctcgtggagcctatcgccaacacatagaagcaataagcccacatccatcnctatacgagtctagatgttccacatgtctcttcgtgcatcgcctcggcag

SEQ ID NO: 7596 - DNA, 454 bp, Homo sapiens
tttttttttttttttttaataaggataccaatctcatcatgaaggatcagccctcattacctaatctaaccttaattacttcccaaaagccccatctccaaaccctatcacattgggggttagggtttcgacatgtgaattttgggggaatacaaatattcagtctgcaccagcaacaatatttatttatgacaaaggaattttatcacaaacattaccagaggaaaacagtcagaaaaacattattattggggctctttcagcctgacctgaacaatcatatcatcaaaagaactccacttaaaacactcttgccaaatcataaaagattcattatcactaattatagtttttggtcattcctaaggaagcggatgtttccatgcaagatgataccaaatggtttctctcaaaatgcactactaaaacaagtttctagattgacattagaaga

SEQ ID NO: 7597 - DNA, 2145 bp, Homo sapiens
cggcacgaggaaattgcagagaaaggagggcatcaagcttaggggaccaatccctgtctttctaccagtccctgataactactcaagctccctttaaagaggctcatattggaatactctgttgacaagtagataccacttcacctctgctagggtgagcgctggtagctcctccctgttaaatgcccatctcaatgcctctgccctaagtgagttgtgcaataaatgagctgtcactctgaacaggtgggaaagaagtgaactgcttgttcacttgctgctgttgccactgctggtacagaaatagaagcacaaaaaaacaaagacaaaaaacctccaagctcccttcagtagttgctacaccttcagattgagacatccttcctcatttacaaacctcagctgtgtctggggcagggccacagtgaaactgccaggagcaaaaaggcttccaagaaaaagtaccacatcagattggaaactggggacagatcattcctgggatgtgacgggcaccagaatgctccctctccaaaggatctaaggaccaaagctgacagtttctttacttgcaggtagctgacagcatctactcctgaagaccggaaacatggcttgtaccatccaaaaggcagaagcacttgacggggctcatttgatgcagatcctctggtatgatgaggaagagtctctctacccagctgtatggttgagagacaactgtccgtgctctgattgctacctggattctgcaaaagcacgggaaacttctagtggaagctcttgatgtgaacattggaattaaaggcttgatatttgacagaaaaaaggtgtacatcacatggcccgatgagcattacagtgaattccaggctgattggctgaagaaaagatgcttttccaagcaggccagagcaaagctccaaagagaattgttttttccagaatgccaatactggggctcagagctccagctacccactttggattttgaagatgttttaagatatgatgaacatgcatacaagtggctctccaccctcaagaaagtaggcatagtaagactcaccggagcatctgacaaaccaggagaagtttcaaaacttgggaaaaggatgggtttcctctatctcacattttatggacatacttggcaagtgcaagacaaaatcgatgcaaacaatgtggcttacacaactgggaagctaagctttcacactgattatccagccctccatcatccacctggggttcagcttcttcactgcataaagcaaacagtcacagggggtgattcagaaattgtagatgggtttaatgtgtgccaaaaactaaagaaaaataatcctcaggcattccagattttgtcctctacctttgtggactttacagacattggagtggattactgtgatttttctgtacaatcaaaacataaaattatagagttagatgataaaggccaagtggttcgcatcaacttcaataacgcaactagggacacaatatttgatgtacctgttgaaagagttcagcctttttatgctgctctgaaggagtttgttgacctcatgaacagcaaagaatccaagtttaccttcaagatgaatcccaggtgatgtgattacttttgataactggcgcttacttcatggccgacgtagctatgaagcaggaactgagatatcccgccatctagaaggagcttatgctgactgggatgtggtcatgtcaaggcttcgtatcttaaggcagagggtggagaatggaaactgaagtcacctgtagataattttaataagattccaatgaccatattttgtgagatatggcacattattcacagaccatgatctttgtgatttacatataatttccttaacaatgaacatgtaacttctctcacaagagtactctttactttgtaatcatatacaatgtcaactttttagatgtttcaccactcttttgcaaataaagcatcctttctgctctgttgcatgcctgctctaatttcttttgcccatatatgagtatctccagaatgtctacaaatagtttttgtagcaaatgaaaatttcttcaaataagccttttgtttcaaataaaacttgtctcaaaacatgcttcaaaaaaaaaaaaaaa

SEQ ID NO: 7598 - DNA, 3307 bp, Homo sapiens
  misc_feature (1708)..(1724): n is a, c, g, or t
cataatgtttcctgaagcatgaaaggatccttgatcagaagagtgctcagttctaatttctaaaatttgctggcttaatatttttaaagatttaattctccatatgagtaagttagcgtgtatcatcaaaaactatctagaactgtgtgcagagactgttactggttttccaagttatatatttttgagtatcttaaaatatttcatcaactttctaaaacatcaagaaaagctctctatacaaataccatggttgattttaattattttgttttccatccttttaaaaatattttctgctttgcatcccattattattttgagtttcttttcatttgtagtttgttgttcattgtgttgttttacagctaagattcatttcatacgtttgatgcttagctgaaaaattacaataaattctccaatgaaattatgtatctttatttaatgaaaatgcctgctgcgtaccaaggtatgtactagggcatctggggtaagtaaaaacaaacacatagagcctgcctggagaagctcatggtctgatggaaagataagcaagaagagttaatttctaatcaatatgataaaaaggtcagagagcagtttctgaaaaacatgtttttgagttgagtcctgaaagacaaggagatgttagtaaagcagagaagggagaattcattctagaaagatcagacagtgtgtgggaagggcagagtctgaaaagagcatgccccatttggagaagcatcaagaagcccacgtgttagaagcaccggccccatgagacaaagacacagctagagagattgactaggccatgtcggaatgtcctcttattttatacatacataagcatatagatacatatagccaaagttacctttttaatgatcttttttacccagtgtattctggaggtcgaatggtcacatatgaacatctccgagaggttgtgtttggcaaaagtgaagatgagcattatcccctttggaaatcagtcattggagggatgatggctggtgttattggccagtttttagccaatccaactgacctagtgaaggttcagatgcaaatggaaggaaaaaggaaactggaaggaaaaccattgcgatttcgtggtgtacatcatgcatttgcaaaaatcttagctgaaggaggaatacgagggctttgggcaggctgggtacccaatatacaaagagcagcactggtgaatatgggagatttaaccacttatgatacagtgaaacactacttggtattgaatacaccacttgaggacaatatcatgactcacggtttatcaagtttatgttctggactggtagcttctattctgggaacaccagccgatgtcatcaaaagcagaataatgaatcaaccacgagataaacaaggaaggggacttttgtataaatcatcgactgactgcttgattcaggctgttcaaggtgaaggattcatgagtctatataaaggctttttaccatcttggctgagaatgaccccttggtcaatggtgttctggcttacttatgaaaaaatcagagagatgagtggagtcagtccattttaaacccctaaagatgcaacccttaaagatacagtgttcagtattattgaaatatgggcatctgcaacacataccccctattatttctacctctttaggaagacacctattccacagagactgatttatagnnnnnnnnnnnnnnnnnttttctggaaacccaagttctctttgactcctctttttgtccaaaagtgatctggtcggatctcacaaggccatccaatgagaccccgcacagcattttctaaagaagaatcgaagcctgaccactttcaccttgggcaagaaggtttggcctttgagttgctattctatgctgaagagcctgcttagaggaggagtaccaggagggagccagcatttcagatctgaagtagacgataggaatgtggaagaacacatacatagtgcttaagaaatacatttaacctgttatgtcagtatttatcaatgaagtttgataattcacttttctgtcattgttaaagcgtacatactgtaaattaaagggaggtgaatggaaattaatgaataaacattttgagtttccctagtgttgaaggaaggtgtactttttcttgtcagaaagataaaaaaaatcaagttgagatgatgtttgaatttcaagaaaagaggctgctttctgtcagtgccctctcattagatctgtgttaattagttagtactccactgcacatgctaatgacttcctctgacagccacacaccgaatcttgatgaaaaaagagaagagcatttgccttgttacatagtctgttacaagccagatatgttgctagctctcaagagttgtaatatattaagaactacaacttatttgattaaaactcagctgtatagatccttttataaagcaccttttgttaaacatcagcctttcattggtattttaaaagcaaggcagatagatatgaagtcagccaactctgacatgcgtcctttcttatctcccttacctgacactaggggctctagagaggcagagagagcactcacaaatcacactaaaactgccagcggcctgactcttactcagtttagcaaaaattcttgcctaaaaagtgataagtaaaaatctgtttatggtatacagttatgtctcgaatctttgaatcaaatccatgttcttattttagaaaggtaagagttcttcaaattcagctacataccaccggctctcccaacctcagacggtgggcatttctggatggatggctgcggttatggataaaggctgtaactgttaacacagaaaaacatgaaaagctcaggcccaagaaaggccttggagccagccaaacagaatttgttctaatggacatggatgatgttgaacagaaaaaagtttacaagtgctttgtggttgcactaatgtatactcactgccattttaagagggggaagtacattttaaaatatatttgaatgtcatgtactgatatgcagtagcttattgtttttctagttgcagagaatgtgaagtttaatctcttaaaatatttagatggtctactttttcattgaatttgtcaatatgtaattgcgttgtaaaatattatatatatatgcttaacttcccaagtgttctgcattgaaccacttagggaaaattttgtttgtttttatgttttgtaatttttaaaattaagtaaagactggatcaaaataattgcatccaacctggaccgtgaaaaaaaaaaaaaaaaaa

SEQ ID NO: 7599 - DNA, 3630 bp, Homo sapiens
ggtggggcggagagcgagtcgcgggccttttgagtccggactcgccgccgccgccgccatattcccgtggcatcttccttactttgtccatcctccggactcgcgatcttccttccggagccatgtcagaaggagtggacttgattgatatatatgctgacgaggagttcaaccaggacccagagttcaacaatacagatcagattgacctgtatgatgatgtgctgacagccacctcacagccctcagatgacagaagcagcagcactgaaccacctcctcctgttcgccaggagccatctcccaagcccaacaacaagacccctgcaattctgtatacctacagtggcctgcgtaatagacgagctgccgtttatgtgggcagcttctcctggtggaccacagaccagcagctgatccaggttattcgctctataggagtctatgatgtggtggagttgaaatttgcagagaatcgagcaaatggccagtccaaagggtatgctgaggtggtggtagcctctgaaaactctgtccacaaattgttggaactcctaccagggaaagttcttaatggagaaaaagtggacgtgaggccggccacccggcagaacctgtcacagtttgaggcacaggctcggaaacgtgagtgtgtccgagtcccaagagggggaatacctccacgggcccattcccgagattctagtgattctgctgatggacgggccacaccctctgagaaccttgtaccctcatctgctcgtgtggataagccccccagtgtgctgccctacttcaatcgtcctccttcggcccttcccctgatgggtctgcccccaccaccaattccacccccaccacctctctcctcaagctttggggtccctcctcctcctcctggtatccactaccagcatctcatgcccccacctcctcgattacctcctcatcttgctgtacctccccctggggccatcccacctgcccttcacctcaatccagccttcttccccccaccaaacgctacagtggggcctccaccagatacttacatgaaggcctctgccccctataaccaccatggcagccgagattcgggccctccaccctctacagtgagtgaagccgaatttgaagatatcatgaagcgaaacagagcaatttccagcagtgccatttccaaagcagtatctggagccagtgcaggggattacagtgacgcaattgagacgctgctcacagccattgcggttatcaaacagtcccgggttgccaatgatgagcgttgccgtgtcctcatctcctctcttaaggactgtcttcatggcattgaagccaagtcctacagtgtgggtgccagtgggagctcttccaggaaaagacatcgctcccgggaaaggtcacctagccggtcccgggagagcagcaggaggcaccgggatctgcttcataatgaagatcggcatgatgattatttccaagaaaggaaccgggagcatgagagacaccgggatagagaacgggaccggcaccactgagaaaggagtctggttggaagcaaatgtttttttaatggacttgcatctcctcaccttgatcaggactaaaggacggaggccgccccacccccttccctttcctccaaacccctaactccctccagacacccagggaataccctctgccccacaggattgaagactgcttggcagtcctcccaatcccacacctcctgtttgccaggggaaagaacctaaagacttcgtgtgattgggaggggtggcagacaggaagaaaacatgtccaggcccctggtctccatagagaatggtgctttgtccaagaaaacgtatgagtttctgattctccgggagccgttcaatggtgaggttgatgggaagacttccttcccaaagaaaatagatcctccatgcaggatctaggagagtgactgggtgtgccaaaatatgcccagggtcctgccctcagcactagatttaatggggccaagagggtccaaaccccttgctaacataccacttctttgtttaactcctttacctttccagccctttgaggagggaccatgagaacagaaattaccttatgaaaagctacttctgttcctgctttccctctcacgtattgacggtttatttctttgacctcccagagggctgaactctttcaactctgcgctgcccagccttctcagtggacttgcccctcctaagcagagaaggcctatgaggttgcttgctgctgggaagcctggcagagccaattaccaccctctgctgcttagtgcttgggtacctcttgcaataaccagctcttagttgttccctttccctggggcttttccatttaacacatggagcccttcccccagaaggctacttccttgttttagaggaaggtactgcccattgggagatggggacattgggacctcagcaatgaagaacccttgtgaagtaaccaggaggaatggggaaagaagcaagttgggcaggatatggcctacttccataggcttttcttttttcaggtttgatgtaagcatgggcttacatcccccaggtacatacttttacttattgtgggataacctggcactagtaggcaggtaaagtcacaaatttggtgtcttttcaccttttgactgttgacttaatagctcctctcactctgcctggagatacttcctgcctcagatgaggagccagaagaaacagagcccgacttgaatgaactcagctcagagttctaaggaccagcattctgggggccattttctctacaggcaaatggaattgcttttccataacatccaaattgtaatgtggttgctgctgaaggaggaggcagcagcgaggtcctgcggtacccatggggtgatgctacttctgcatgcatctacagggcatctgacacctaacatgagacgtggcatgtgagatgagacttggcatgtgagacatagggtcactagagacccttctgggtcagaggagagagactgaattggactaaacccgtcctctgttcccagcacgtttctcatatagccctcagtcactgagggagtcccccgcaggattggagaggcacattcccttgggacagaggctacaggttggagctttttttcccctgtcccccaaccccatccccacctccacttcagaacatggcaccccacccaactggccaagtgttaagtgatgtgcttattgagagcaactccgggtgtcttttaaaatgtagagaaaaggtgacagtttaaggaaaaatatatatagaataccagaaatgccgtttacccggagaatttttttctccccatttgttttgtttttactcaatgacaccatttttagttttatttcctgatagcaaaaggaaaaaaaacacccatccctcaaaaaggccaaggtcccgtccccctgttgtcggtgatttgtttgtctttctgataggttgaaaattgtgtaataaacttgatgacgctgtcaaaaaaaaaaaaaaaaaaaaaaatttttccttttgtaacaaaatatttttaaataataaatggggtgtgagctgttttatggaaaaaaaaaaaaaaaaaaaaaaaaaaaaaaa

SEQ ID NO: 7600 - DNA, 1414 bp, Homo sapiens
gtgtatggaggttattatttgaagggtacaatcactacaacatgctctgccacccactccttttccagtgacactacttgagccacacactttcctttacaggccagcctctggcgtttgctgcacctcattgccaccttcctgtctctctgtgctaaacattcaggacagtgttccacaggcagatctggcctatttcattagtcaccatggcttggctgtgaagtacgttgaaggtggatcttgtcacatgccccttcagtgttcacctggccctctggtttaagttctgtctgccttacgtgactgagtttgactgtccaggttgctttgctcggtgaagagaggagggtaaatcggattctcgtttagcactgggttatacagatctggcaccctaacctaaaccaaggcatcttcactccaagagcagttggagagtctgggttagccttacgtggacctcgccgctcgctggcggtcacgattgtgagccctccagacaatttttaaggttgagtctaagtaaggctgcttgggaaatggtcagctaagtaaatcacctttcatttcacataaggcccttaatatagataagtaacatttggcctttggtgtctcgtgactctcagaggcgtaggtagaggagcaaattaatatttgcagcatgggaattccttatcagaattttgaggggaataaatcctcatcagagacaaaaggacttaatcatctggccacctatcacttcagttctctgtataaatgaaatttaattctaacaaccttataaaaagaaggtccagacagcagaggaaacatcctgtccaattctaggttttcctcccttggcctcctttccccagcattgtctaccctggcccacttcctgcattctccccatgccctgctatttctgattctttgcttctcctagcgagatactttccttatatgatagctgctgagaagtttcccagaactgctagaggaaaagaagtggggaatttaggaaatatccctcactgacctaactccattatcttcactctttccttcttcctgccacctcatgcccattctctttactgtctagcatgctgaaagaaggaagtgatctaaatgccagcgtgttcagtggtaaatattagttggtgcaaaagaaaaaccatgattacttttgcactaacctaatagctttgcaaattttaagaacttgctttatgaagatattcggatatggattctccccaccccacatacttagacattgttcaaatatactacttttaaaaaaacaccttttcaaacagaattagcgttttgccaagtctggtattaatggaattgtacaggagctttgaaagttttcaaactttattaaactaaaaaaaaaaaatcgaaaaaaaaaaaa

SEQ ID NO: 7601 - DNA, 1984 bp, Homo sapiens
agcagccggcgcggccgccagcgcggtgtagggggcaggcgcggatcccgccaccgccgcgcgctcggcccgccgactcccggcgccgccgccgccactgccgtcgccgccgccgcctgccgggactggagcgcgccgtccgccgcggacaagaccctggcctcaggccggagcagtgctcacccggcccggtgccacccgggtccaccgggatgcgaaggagcgggacaccatgaaggaggacggcggcgcggagttctcggctcgctccaggaagaggaaggcaaacgtgaccgtttttttgcaggatccagatgaagaaatggccaaaatcgacaggacggcgagggaccagtgtgggagccagccttgggacaataatgcagtctgtgcagacccctgctccctgatccccacacctgacaaagaagatgatgaccgggtttacccaaactcaacgtgcaagcctcggattattgcaccatccagaggctccccgctgcctgtactgagctgggcaaatagagaggaagtctggaaaatcatgttaaacaaggaaaagacatacttaagggatcagcactttcttgagcaacaccctcttctgcagccaaaaatgcgagcaattcttctggattggttaatggaggtgtgtgaagtctataaacttcacagggagaccttttacttggcacaagatttctttgaccggtatatggcgacacaagaaaatgttgtaaaaactcttttacagcttattgggatttcatctttatttattgcagccaaacttgaggaaatctatcctccaaagttgcaccagtttgcgtatgtgacagatggagcttgttcaggagatgaaattctcaccatggaattaatgattatgaaggcccttaagtggcgtttaagtcccctgactattgtgtcctggctgaatgtatacatgcaggttgcatatctaaatgacttacatgaagtgctactgccgcagtatccccagcaaatctttatacagattgcagagctgttggatctctgtgtcctggatgttgactgccttgaatttccttatggtatacttgctgcttcggccttgtatcatttctcgtcatctgaattgaggccaaggttcgggtatcagtggtgcgacatagagaactgtgtcaagtggatggttccatttgccatggttataagggagacggggagctcaaaactgaagcacttcaggggcgtcgctgatgaagatgcacacaacatacagacccacagagacagcttggatttgctggacaaagcccgagcaaagaaagccatgttgtctgaacaaaatagggcttctcctctccccagtgggctcctcaccccgccacagagcggtaagaagcagagcagcgggccggaaatggcgtgaccaccccatccttctccaccaaagacagttgcgcgcctgctccacgttctcttctgtctgttgcagcggaggcgtgcgtttgcttttacagatatctgaatggaagagtgtttcttccacaacagaagtatttctgtggatggcatcaaacagggcaaagtgttttttattgaatgcttataggttttttttaaataagtgggtcaagtacaccagccacctccagacaccagtgcgtgctcccgatgctgctatggaaggtgctacttgacctaagggactcccacaacaacaaaagcttgaagctgtggagggccacggtggcgtggctctcctcgcaggtgttctgggctccgttgtaccaagtggagcaggtggttgcgggcaagcgttgtgcagagcccatagccagctgggcagggggctgccctctccacattatcagttgacagtgtacaatgcctttgatgaactgttttgtaagtgctgctatatctatccattttttaataaagataatactgtttttgagacaaaaaaaacgggtcgtaaaaaaaggcgtgcggg

SEQ ID NO: 7602 - DNA, 1202 bp, Homo sapiens
  misc_feature (243)..(267): n is a, c, g, or t
  misc_feature (271)..(271): n is a, c, g, or t
tagggagagcgctgcattgagtgtgctgtcgggcagcgtcacggctgcctcactgccggcgtctacgagtcaggcaaagtcttgaacggtggctttcgacgctagggcactcgctggtggtgggtgcgccgtgctgagctctggctgtcagtgtgttcgcccgcgtcccctccgcgctctccgcttgtggataactagctgctggttgatcgcactatgactctggaagaagtcctgggccannnnnnnnnnnnnnnnnnnnnnnnnaggntgcagggtgccgggaaagcgctgcatgagttgctgctgtcggcgcagcgtcagggctgcctcactgccggcgtctacgagtcagccaaagtcttgaacgtggaccccgacaatgtgaccttctgtgtgctggctgcgggtgaggaggacgagggcgacatcgcgctgcagatccattttacgctgatccaggctttctgctgcgagaacgacatcgacatagtgcgcgtgggcgatgtgcagcggctggcggctatcgtgggcgccggcgaggaggcgggtgcgccgggcgacctgcactgcatcctcatttcgaaccccaacgaggacgcctggaaggatcccgccttggagaagctcagcctgttttgcgaggagagccgcagcgttaacgactgggtgcccagcatcaccctccccgagtgacagcccggcggggaccttggtctgatcgacgtggtgacgccccggggcgcctagagcgcggctggctctgtggaggggccctccgagggtgcccgagtgcggcgtggagactggcaggcggggggggcgcctggagagcgaggaggcgcggcctcccgaggaggggcccggtggcggcagggccaggctggtccgagctgaggactctgcaagtgtctggagcggctgctcgcccaggaaggcctaggctaggacgttggcctcagggccaggaaggacagactggccgggcaggcgtgactcagcagcctgcgctcggcaggaaggagcggcgccctggacttggtacagttgcaggagcgtgaaggacttagccgactgcgctgctttttcaaaacggatccgggcaatgcttcgttttctaaaggatgctgctgttgaagctttgaattttacaataaactttttgaaacaaaaaaaaaaaaaaaaaaaaaaaaaaaaaaaaa

SEQ ID NO: 7603 - DNA, 1962 bp, Homo sapiens
cttctctggttccctgacctcagtgagacagcagccggcctggggacctgggggagacacggaggaccccctggctggagctgacccacagagtagggaatcatggctggagaattggatagcagagtaatgtttgacctctggaaacactcattctcaatgcaagatcctccgctgcaatgctgagtacgtatcgtccactctgagccttagaggtgggggttcatcaggagcacttcgaggaggaggaggaggccggggtggaggggtgggctctggcggcctctgtcgagccctccgctcctatgcgctctgcactcggcgcaccgcccgcacctgccgcggggacctcgccttccattcggcggtacatggcatcgaagacctgatgatccagcacaactgctcccgccagggccctacagcccctcccccgccccggggccccgcccttccaggcgcgggctccggcctccctgccccggacccttgtgactatgaaggccggttttcccggctgcatggtcgtcccccggggttcttgcattgcgcttccttcggggacccccatgtgcgcagcttccaccatcactttcacacatgccgtgtccaaggagcttggcctctactggataatgacttcctctttgtccaagccaccagctcccccatggcgttgggggccaacgctaccgccacccggaagctcaccatcatatttaagaacatgcaggaatgcattgatcagaaggtgtatcaggctgaggtggataatcttcctgtagcctttgaagatggttctatcaatggaggtgaccgacctgggggatccagtttgtcgattcaaactgctaaccctgggaaccatgtggagatccaagctgcctacattggcacaactataatcattcggcagacagctgggcagctctccttctccatcgaggtagcagaggatgtggccatggccttctcagctgaacaggacctgcagctctgtgttggggggtgccctccaagtcagcgactctctcgatcagagcgcaatcgtcggggagctataaccattgatactgccagacggctgtgcaaggaagggcttccagtggaagatgcttacttccattcctgtgtctttgatgttttaatttctggtgatcccaactttaccgtggcagctcaggcagcactggaggatgcccgagccttcctgccagacttagagaagctgcatctcttcccctcagatgctggggttcctctttcctcagcaaccctcttagctccactcctttctgggctctttgttctgtggctttgcattcagtaaggggaccatcagtcccattactagtttggaaatgatttggagatacagattggcatagaagaatgtaaagaatcattaaaggaagcagggcctaggagacacgtgaaacaatgacattatccagagtcagatgaggctgcagtccagggttgaaattatcacagaataaggattctgggcaaggttactgcattccggatctctgtggggctcttcaccaatttttccagcctcatttatagtaaacaaattgttctaatccatttactgcagatttcacccttataagtttagaggtcatgaaggttttaatgatcagtaaagatttaagggttgagatttttaagaggcaagagctgaaagcagaagacatgatcattagccataagaaactcaaaggaggaagacataattagggaaagaagtctatttgatgaatatgtgtgtgtaaggtatgttctgctttcttgattcaaaaatgaagcaggcattgtctagctcttaggtgaagggagtctctgcttttgaagaatggcacaggtaggacagaagtatcatccctaccccctaactaatctgttattaaagctacaaattcttcacaccaaaaaaaaaaaaaaaaaaaaaaaaaa

SEQ ID NO: 7604 - DNA, 563 bp, Homo sapiens
ttttttttttaacacctactatgtattattctggagactgggctaatggacatgaggactcaaggcggaacccaaagagatcacagctctggctgaagatgcaaagaaatgatttggtgattacacttttctttgttatctctagctacccttcattagcatgaatgattgagagattacgatacttaaaatgctggcatacaatatacagtcagctctcaatttccagtgtgcaacgaaataactgaggctctctaaggcttaccctaagtcccagggatctgctaggcagctcagcacatccccagctcacaccccttcactgctcagcctgtgtgtctgcacagactgcagcccatcttgagattatcctaagtaaaaaggaactgattgggtaaaacagctataaagagccacagaaagcttttcaaagcaaatgtaaagaaacctaaaatagctgatgagccagaagccctcccttgaatgaataagtgagtgttagctatgtttttaaaagttactgacatgttattctagtttacatatgacatcgattctcgtgc

SEQ ID NO: 7605 - DNA, 3654 bp, Homo sapiens
  misc_feature (230)..(258): n is a, c, g, or t
aaaaaaaaaaacacctgaagattcaggtgccccagggactggaagaaattacagtgcctacttggaaagaagaagagatagcgacttgccccagtccaaccccagagcgggagctgtggctaaaggaagtggaggggccgtgggatgcggagagccgagggctaactcccggacagcggaacagagagagctgccgacaaacagacgcaggcggaggagccgtcacctcnnnnnnnnnnnnnnnnnnnnnnnnnnnnnaaaccctaccgtaaggcaccaccagagcatcgggagctgcgtttggaaattcctggatcccggcttgagcaggaggaacccctgactgatgcagaaaggatgaagctcttacaggaggagaatgaagagcttcgccggcgcctggcctccgccaccagacgcactgaggcgctggaacgtgagctggaaattgggcaggactgcctggagctggagctgggccagagccgcgaggagctggacaaatttaaggataagttccgcaggctgcagaacagctacacggcttcccagcggaccaaccaggagttggaggacaagctgcacacactgatcaagaaggctgagatggataggaagacgctggactgggagattgtggagctgaccaacaagctgctggatgccaagaacaccatcaacaagctggaagagctcaatgagcggtaccggctggactgcaacctggctgtacagctcctcaagtgcaacaagtcccaggtccgaaaccacaagtttgccgatgtgagtagaactcaccccctccctgcccacatagaccattccggccactgtaggactcctctaactccagtttctgcacctctctctgtcctcctcttcccactttgccctcctcttgcctccatgtcacctctcaagccagtcaactctgccactggttggtgtcccgtgtactgtccagggcccatcactagttctggggggccagccctgttggtttctgtaacagagacagagagagaagatcctgggcaggaaggagagggtagtcagagctatctgcccaaagagtactaagagaggattaggcccatctgatcatgttaccccaaggggtaaactctagaccccacagcttcaggcccaaggtttatgtggcctgcagaagtagaagaagtagaggtatttctttttttttttttttttgagacggagtcttgctctgtcacctaggctggagtgcagtggcacaatctcggctcactgcaacctccgcctcccggcttcaagcaattctcctgcttcagcctcccaagtagctggaattataggcgcccaccaccacgcctggctaatttttttgtctttttagtagagatggggtttcatcgtgttagccaggatggtctcgatctcctgacctcgtgatccacccgcctcggcctcccaaagtgctgggattacaggcatgagccactgtgcccggcccagaagtagaggtatttctaaggctactggtctatgcagattctccaaacttaagtatggtttgggcagaagctgggagatagaagtttgagaacatgctggctgcagcagcagatccgggtttaaatcttggccaagttaaccaaagctttgagttgtcttcccctctccaggcctatgtgtctgtgaagtgagggtatacacactggcatgctgtaagaacaggagatagcagagtgctgagtacacagaggtacttaaaggtgggagccattactttcgccatgagtcaagttatctttggctgcgatcattgatgtctctctttcctgctcttttacctcagctgccctgtgagctacaggacatggttcggaaacatttgcacagtggtcaagaggccgccagcccaggtcctgctcccagcctagccccaggggctgtggtgcctacctcagtcattgcccgagtgttagagaagccggagtctctactgctcaattcagcccagtcaggcagcgccgggcgccccttggctgaggatgtctttgtgcatgtggacatgagtgagggtgtcccaggtgatccagccagtcccccggcccctggcagccccaccccacaacccaatggggagtgccactctctgggtactgccaggggctccccggaggaagagctgcccctgccagcctttgagaagctgaacccctacccaaccccgtctccaccacacccactgtatcctggccgcagggtaatagagttctctgaggataaggttcggatcccccgcaacagccccctgcccaactgcacttacgctacccgccaggccatttccctgagcctggtagaggaggggagtgagcgggcccgccccagcccagtgcccagcacccctgcctcagcccaggcctcaccccaccaccagcccagcccagcacccctaacactcagtgccccagctagctctgccagctctgaagaggacctgctggtcagctggcagcgggcatttgtggaccgtactccaccacctgctgctgtggcccagcgcacagcctttggacgcgatgccctccctgagctgcagcgccattttgcccatagccccgctgacagagatgaggtggtccaggcaccttctgcccgacccgaagagagtgagcttttgctacccacagaacctgactctggctttcccagggaggaagaagagctgaacctgcctatcagtcctgaggaagagcgccagagcctgctgcccattaacaggggcacagaggaggggccaggcacttcccacaccgagggcagggcctggccactccccagctccagtcgcccccagcgcagccccaagaggatgggggttcaccacctgcaccgcaaggacagcctgacccaggcccaggagcagggcaacctgctcaactagggcccctgctggccttcctgccattgctgcaccaggactgcaaggagtccccacaccttggcagctcagggtccccagtccaagcccttgacctctcctctatccagacccgcacagctgtttcctgtgtggatggggtcaggttgtgggccatgccaggcctgtcagctgcgttgactgactgcagcagcttgcctcatggttttccctttttcttagaatatttattcttcagaggtaacatgcagttgggtctcaagacctttcctccaatcagcccaacccagcccagactgggcttttctggggagctgaggagtttatcagtattcatcttccatcctttcatagtcacaagttttgttattttgtttttttttgggggtgatggtgtaattgttaacctcatttccgtttcctacctgtttgcttccccccccagtcctccgcatgagctgttgccctccaggggcctggcacagctggccttggggacgagggagaggactgattcagggccccctcagctgtctcctccctccctctggaaaggagggtggggctcaggggcctcaagctgggctctgtgtgaggcctggcccccactcccaaccttggctctagactgttactcttaagctttgagaaattttcacattgatgactattttaaaatcaaataaaactattttactggtaaaaaaaaaaaaaaaaaaaaaaaa

SEQ ID NO: 7606 - DNA, 3277 bp, Homo sapiens
  misc_feature (363)..(363): n is a, c, g, or t
  misc_feature (377)..(377): n is a, c, g, or t
  misc_feature (2955)..(2977): n is a, c, g, or t
  misc_feature (3204)..(3207): n is a, c, g, or t
  misc_feature (3210)..(3211): n is a, c, g, or t
  misc_feature (3222)..(3223): n is a, c, g, or t
cgcgcccaatcggtagtggcgagtgttttgtttccccccccctttttcccgggaaaaaaaatttttttatttctccccccgcgagggggttataaattttcttggggggggggtgttccccccaaattttccccccccccccccaagagggagaggtgttctctcccaaaagagcgcccccgggagggccaggttttttccccccaccccggcgggtgtgaaaaaagaccccccgccccccccccccgttaataaaggccccccccatgaggggcccctctttttttaaaaaaaagggggggcccgggaaaagtggggccccccccgggggggttttttttgggcgcgcccccccccttgttnttgggttgttgtgnttgtggtgtggttgtgttggtgtggttgtttctttgggtctttgttggtgtggggggggtgtttgttttgtttttttttttgtttttttttttttttttttgttgttttttttttttttttttttccagaggaaatgtttcgttttatttttgctcataacctcccaaaaaaatcagtaccccgccatccctcacccagacacagcccctctccaacaccttcacgaaacactgattttttttcttagagctaaaatgaacacccagtcaccaactacagccctgccctgcccctcctcccactggcctgctcatcttcccgcactgcaaacctggccgcctttagcctccctcccttagcgtagtgtcccaaggtcacctagcctgctttttgcctgtaggatatgggtccccttctcaaagcccgccctgacttacttcctcatttgcatagtccttcagctctatcctgtcgccactccacccaccccagacaaccacctgtaagaaaccaggtttgaaattcaagagaccaggtttccaagctcccagctgcttccctgtgggcctcggtgcctcggctgttatgtgacgggcatagacattgactaaggccaaacatttcatgatttggacgagaaaggagggaaggagatccagaaatacgcaagagaggtgataagcagagacagaggataaaaggataagagtagagaggagttgggtggtttggtggggaagaagggttgattttttttttttaatagagacagggtcttactatgttgcccaggctggtattgacctcctggcctcaaacgatcctcctgccttggcctcccaaagtgctgggattacaagcataagccactgcacccggccgagaggggtttggaatgaaggtagaggcagggggatgaaggcgccagagctgaagaccagcccccagaagccacacccctgcccttctagcagctacgggtcctctggctccgggccttgtaaacctcgatgagcaggtccttgacgtactggatctcgcgctccacggactctgcccgttccttcagctcgcgattccgtgcctccagcccctggcactcgccctccagggcctcaccctctgcccgcttccgctggcggtacctcagagccgccgacttgttctggtctctcttcttttgcttgcggtcccctcgggtggtggcaggatgtgggtagggggccaggcgagaaggttgaggtggagaaggaggagggggctgctgtggcgggggcagaggcggcatccccacttcctcctgcccggcctcgttgcggcagtagatggccagcaagtccagagtatccaagacagggggctgggggaggtcaaaggaggggagggacagggggagggagggggctggtggtagtggtggtggtggtagtggcggcggggagggtggtgggaggggcggggcatctaggaagaagtcttccatctgttccagctccttcttgaggagggaggccatagcttccaggtcaggtggggttggggaaggttgggggagggtgccggggggtaggggaggctccagagggaggagagctgtgaaatcaactcgctcagtcatccagtcagagaagccatcacctgccaggggctctccccccactggaagcccgccctcccagggctccccccaaggacctccatagggagccaggggggcaggggccggggggagtttcccatagtctacgagccatcccagcccactagctgggagcagggccctgtccagctccagccccagggtcgccaggagtgacatggctgtagcacaggtgctgggcactgatggcaacaggagaggctgcaccagcagctggcacgaggctctggaggatgctcaggtgggcgaagacaggcaccaaggcgaaagtggaagactccatggctgcagcaaggagaggcggcggcggcctcggctgaagaaagaaggtgggagcggagagcgcaggcgtggtgagcgcggagacgggccgggggcacaaaggggtcgaggctacagagccatggccggggctacgcaggcagaggcggcgacactgtagtgagaagagactgtgatccgaggacagggaatgaatcggccccgggactggggacagatatatactgggtggcggagcacggccctcccggatccttccgcgccccgccctcgcgcggccccaaccgggaggcagccgggtcccctcctcctggggatcaggggatccgagcctttccttcccactcctagggtccgggaccctcctccctctcagctggggatccgacctcttccctctgagccggggatccagccctctccttgtggctccggggtctggtttcctcctcctgactctaagctctggtttctttctctttctgcctctgaggtctgggcctgcttcctcctgtgattttgaggatccagcctcattctcttcccgcagacctgcaccagttcatttctctttccctttccttgcttgcagaatttcctgccagtcacttttcacttcttcatcccccagctgnnnnnnnnnnnnnnnnnnnnnnncctcgtgggttagagtccagcatgagtcacagcactctcccaaatacagacctgccaagatgggctcgggcaaataacttaagttctcttacttcatttccctatctgtaaaataagaaaaatcacctcgcctggtggggtttatgagactcaaaataagacgattgtctggcaaagccttaatgcacagaggcttcaactccataccattcctggttcccactttnnnnatnnattttttatanntttgggagaacgggagtttctccttcccggcctccgggtcgcccccacgggggt

SEQ ID NO: 7607 - DNA, 4069 bp, Homo sapiens
  misc_feature (1215)..(1234): n is a, c, g, or t
  misc_feature (1495)..(1519): n is a, c, g, or t
  misc_feature (1990)..(2004): n is a, c, g, or t
ccacgcgtccgacgccccccacccgggaggggggagagaggcaaaaagtaagagaggaaaaaaaatagcaggaagatggcgcccaccaagcccagctttcagcaggatccttccaggcgagaacgtttacaagcattgagaaaggagaaatcccgagatgctgctcgctcccgccggggaaaagaaaactttgagttctatgaattggccaagttgttgcctcttcctgcagccattaccagccagctcgacaaggcatccatcattcgacttacaattagctatctgaaaatgagggactttgctaaccagggggaccctccgtggaacttgcgaatggaaggccctccacctaacacatcagtaaaaggtgcacagcgaaggagaagccccagtgcactagccattgaagtatttgaagcacatttgggaagccacattttgcagtccctggatggctttgtatttgcactaaatcaggaaggaaaatttttgtacatttccgaaacagtctccatctacctaggcctctcacaagtggagctgacaggcagcagtgtctttgactatgtccaccccggagatcacgtggagatggctgagcagctgggcatgaagctcccccctgggcggggtctcctgtcacagggcactgctgaggacggagccagctcagcatcttcctcctctcagtcggagacccccgagccagtggagtcaaccagccccagtctgctaaccactgacaacactcttgagcgttcctttttcatccgaatgaaatctactctgaccaaacgcggtgtgcacatcaaatcatcaggatataaggtgattcacataacaggccggctacgcctgagagtgtcgctgtcccacgggaggaccgtccccagccaaatcatgggtctcgtggttgttgcgcatgccttgcctccccctacgatcaatgaagtcagaattgactgccatatgttcgtcactcgagtaaatatggacctcaatatcatttactgtgaaaataggattagtgattatatggatctgacccctgtagatatcgtagggaagagatgctaccacttcatccatgctgaagacgtggagggcatcaggcacagtcacttggacttgctgaataagggtcagtgtgtgacaaagtactatcgctggatgcagaagaacggaggatatatttggatacagtccagtgcnnnnnnnnnnnnnnnnnnnnagaatgcaaatgaaaagaatatcatctgggtgaattaccttcttagcaatcctgagtacaaggacacacccatggacatcgcacagctcccccatctgccggagaaaacttccgaatcctcggagacatccgactctgagtcagactctaaagacacctcaggtattacagaggacaacgagaactccaagtccgacgagaaggggaaccagtccgagaacagcgaagacccggagcccgaccggaagaagtcgggcaacnnnnnnnnnnnnnnnnnnnnnnnnnacgacgacggccacagctccagtaacccggacagccgcgacagcgacgacagcttcgagcactcggactttgagaaccccaaggcgggcgaggacggcttcggtgctctgggcgcgatgcagatcaaggtggagcgctacgtggagagcgagtcggacctgcggctgcagaactgcgagtcactcacgtccgacagcgccaaggactcggacagcgcaggcgaggcgggcgcgcaggcctccagcaagcaccagaagcgcaagaaaaggcggaaacggcaaaagggcggcagcgccagccgccggcgcctgtccagcgcgtcgagcccaggcggcctggacgcgggcctggtggagcccccgcggctgctgtcctcccccaacagtgcctcggtgctcaagatcaagacggagatctcagaacccatcaatttcgacaatgacagcagcatctggaactacccgcccaacnnnnnnnnnnnnnnnaacgagtccccctacagcatgaccaagccccccagctctgagcacttcccgtccccgcagggcggcggcggtgggggtggcggtggcggggggctgcacgtggccattcccgactcggtcctcaccccgcccggcgccgacggcgcggccgcccgcaagactcagttcggcgcctcggccaccgcggccctggcccccgtcgcctccgacccgctgtcacccccgctctcggcgtccccgcgggacaagcaccccgggaacggcggcgggggcgggggcgggggcggcggcgcggggggcggcggccccagcgcgtccaactccttgctgtacactggggacctggaggcgctgcagaggttgcaggcgggcaacgtcgtgctcccgctggtgcacagggtgaccgggaccctggccgccaccagcacggccgcgcagagggtctacaccacgggcaccatccgctacgcgcccgccgaggtgaccctggccatgcagagcaacctgctgcccaacgcgcacgctgttaacttcgtggacgttaacagccccggctttggcctcgaccccaagacgcccatggagatgctctaccaccacgtgcaccggctcaacatgtcaggaccgttcggcggcgcagtgagcgcagctagcctgacgcagatgcccgccggcaacgtgttcaccacggccgagggactcttctccacgctgcccttccccgtctacagcaacggcatccacgcggcacagactctggagcgcaaggaggactgaggcgccgcccgtcctgggcccggccaggccccgcttggaggaggcatcgtcggcattttcgtttagacctttaattctagcactttgaattcgagcaggtcagcgtcttctctcgccacgacggtccccattccaccccctctttctttcacctgacttattctttcgtgtaaagatatgtttattttttgccttcagagggtcagacgaccagttgcctgccgttttgtcttcttctaaggtgtgtgttgggttgttttgctttcctttgcatctttattaagatgtctttcatgtgtatatgcctctgccatagaatactcagtcttgtggtcaagagagttctcaagtgacaaccattggggtttcttcataaagatcttgatatgatcaagatggaaagagacaagcataaacaatgtgccctgtttgactaagtcaaatgaaatagggtggtttttgtttctgttcctaattcctttaaaaaatagggggaatagtattttagaattttatgcagaatttaattctctttttacggttaagattttaagattttcttacttgcacataaaaataatttgggttcttaaacttaatttctggcctgtgactagaatgtttaaaaaaaaaaaaaaccctcgtgctaaatgttaattactgaaacattaacttaatttctaaaaccatggtgctatcatttattaatctgtaatgtcttcatacaaaatgcagctcctgggctgggttttgggggaaaaaaaaaaaatgtgttctgtcctggtctggagtccgttgctgcagtctccttggttagttaagacaaagccctcattaacgtttgctgcaggacttaaaattttttacctcccaactaacaaacatagcctcacattaaatttaatgggtcagtaaagccccttttaaaggggctgctggaaaactcaatcaaactgatttgaggagcagtttaggtacatactgccttttgtttagctttttgttttccttactcagtctaactgaggctaattttgcaacttcaataacacttcggagtaaaagaaggaaaatatttaacatgtttttggtttttttcattccttgcttaaaacaaaaaggaaggttgtatttggggggactggtttgatttgatggaatttctttccctttggttcttatttctgggttgaaaccaataagttttaaaactaaagaatgggttaataagcttcagacagataactgcaactgaaaactgcacattaagtaaaaaaaaaaaaaagga

SEQ ID NO: 7608 - DNA, 416 bp, Homo sapiens
tttttttttttttttttcatcatctcaagaaatcaaaggcatgcacctggaaaaagaaaacacacttttgaagtcttctaatcactagggctctgtattttgttgcagtcctatagtgtgggtatttaaagaataaggccaggcaactctgtctctagtctttgttcattcatttgatgcgtccttgagcaccttactaagcaccagtcaatgttgtggacaatggggatatagcatgatgaagccagaaaggatactgccaaaaaggcatacattaaactcataattacacccaaatttaccaaatacaggatccttctttgctaccacaaaattcttaatggctttaagtctcaactttctcatctgtaaactaagggcaataacagctgctccttctgtatgttgctgtgaga

SEQ ID NO: 7609 - DNA, 5950 bp, Homo sapiens
  misc_feature (222)..(252): n is a, c, g, or t
tacggctgcgagaagacgacaggagtgcgcagcgccggcttcttcccagcgcgagttgctgctaacgctcctcctccagcttcccacccccgccgcccgccgcggcccggtaccaacgggtggtctcgccgagggagctgtcgtgcctcgtggtcccgggactgcagtggtgtgcgctctcggcgcgtggcgctaggcatggcgatggatcaagtaaacgcnnnnnnnnnnnnnnnnnnnnnnnnnnnnnnngtcatgatggaccccaactccacccagcgctaccggctggaagccctcaagttttgtgaggagtttaaagaaaagtgtcctatctgtgtcccctgtggcttgaggttggctgagaaaacacaagttgccatcgtcagacattttggccttcagatcctggaacacgttgtcaagtttcggtggaacggcatgtctcgattggagaaggtgtatctgaagaacagtgtcatggagctgattgcaaatggaacattgaacattttggaagaggagaaccatattaaagatgctctgtctcgaattgtagtggaaatgatcaagcgagagtggccacagcattggcctgacatgctaatagaattggacactctttccaaacaaggggaaacacagacagaattggtgatgtttatccttttgcgactggcagaggatgtagtgacttttcagacacttccccctcaaagaagaagggacatccagcaaacattaacccagaacatggaaaggatcttcagttttctgcttaacacacttcaagaaaatgtaaacaagtatcagcaagtgaagacagatacttctcaggagtcaaaggcgcaagcaaactgtcgagtaggagttgcagcactgaatactctagcaggctatattgactgggtgtctatgagtcacatcactgctgaaaactgtaaactcctggagatactgtgtttgctgttgaatgaacaggaacttcagttgggagccgctgagtgtcttctcattgcagtcagcagaaaaggcaagttggaagaccggaagcccttgatggtcttatttggagatgttgccatgcattatatactctccgccgcacagactgctgatggaggaggtttggtagaaaaacactacgtctttctgaagaggctctgtcaggtgttgtgtgcgctgggcaatcagctgtgtgcattgctgggtgcagattctgatgtagaaacaccatcaaactttggaaaatacctggaatcttttcttgctttcacaacccatccaagtcagtttctacgctcttcaactcagatgacttggggagccctcttcaggcatgaaatcctgtcccgtgatcctttgctattagcaataataccaaaatatcttcgtgcttccatgactaacttggtcaagatgggctttccttctaaaacagacagccctagctgtgaatattctcggtttgattttgatagcgatgaggacttcaatgctttcttcaactcctcccgagcacaacaaggagaggtgatgaggttggcatgtcgtttggatcccaaaactagcttccagatggctggggagtggctaaagtatcaactatcaacttttcttgatgctggttctgtgaattcttgttctgcagttggaactggagaaggaagcctctgttccgtcttctcaccttcattcgtgcagtgggaagccatgactctttttttggaaagtgttatcacccagatgtttcgaacactaaatagagaagaaattcctgttaatgatggaatagagctattgcagatggttctgaactttgataccaaggatcccctcatcctgtcctgcgtccttactaatgtctctgcactctttccatttgtcacctacagaccagagttcctgccccaggtcttctctaagctattttcatctgtcacttttgaaactgttgaagaaagtaaggcccccagaacccgggcagtgaggaatgtgaggaggcatgcttgttcctccatcatcaagatgtgtcgtgactacccccagcttgtgctgcccaattttgacatgctttataaccatgtgaagcaactcctctccaatgagctactcctgacacaaatggagaagtgtgccctcatggaagccctggttctcattagcaaccaatttaagaactacgagcgtcagaaggtgttcctagaggagctgatggcaccagtggccagcatctggctttctcaagacatgcacagagtgctgtcagatgttgatgctttcattgcgtatgtgggtacagatcagaagagctgtgacccaggcctggaggatccgtgtggcttaaaccgtgcacgaatgagcttttgtgtatacagcattctgggtgtggtgaaacgaacttgctggcccactgacctagaagaggccaaagctgggggatttgtggtgggttatacatccagtggaaatccaatcttccgtaacccctgcacagagcagattctgaaacttcttgacaatttgcttgcgcttataagaacccacaatacattatatgcaccagaaatgctagccaaaatggcagagcctttcaccaaggctctggatatgcttgacgcggaaaaatctgctatattaggattacctcaacctctcttggaactcaatgactctcctgtcttcaaaaccgtcttggaaagaatgcagcgtttcttctctaccctctatgaaaactgttttcatatcctagggaaggcaggcccttccatgcagcaagacttctatactgtggaggaccttgctacccagcttctcagctcagcctttgtcaacttgaacaatattcctgactaccgactcagacccatgcttcgtgtctttgtaaagcctctggtgctcttctgtcccccagagcactatgaagccctggtatcccccatcctcggacctcttttcacctacctccatatgaggctttctcagaaatggcaagttatcaaccaaaggagcctgctgtgtggagaagatgaggctgcagatgaaaacccagagtctcaagagatgctggaggagcaactggtgaggatgttaacccgagaagtcatggacctaatcacggtttgctgtgtttcaaagaagggtgctgaccacagtagtgctcccccagcagatggagacgatgaagaaatgatggccacagaggtcaccccctcagctatggcagagcttacagacctgggcaaatgtctgatgaagcatgaggatgtttgtacagcgctattaattacagccttcaattccctggcctggaaagatactctgtcctgccagaggacaacctcacagctctgctggcctctcctcaaacaagtgctgtcagggacactgctcgcagatgcagttacgtggcttttcaccagtgtgctgaaaggcttacagatgcacgggcagcacgacgggtgcatggcttccctggtccatctggccttccagatatacgaggcactgcgccccaggtacctggagataagagctgtaatggagcaaatccctgaaatacagaaggactcactggaccagtttgactgcaagcttttaaacccctccctgcagaaagtggctgacaagcgccgaaaggaccaattcaaacgcctcattgctggttgcattgggaaacccttgggagagcagttccgaaaagaagttcacattaagaatcttccctcacttttcaaaaaaacaaagccaatgctggagacggaggtgctggacaatgatgggggtggcctggccaccatctttgaaccctgaatcaagcttttgggcatccttcctcggcctttcttgtcatctcttctttccctttgtagccgatctctaggcccttcttgcactgccacctcactttccaccactgtcagcctggaaagagatccaggtctggagctggagagaacaggccctgtgcaggaccagaagtaattatactaaagtatcaagaaagggagttagggcttaaactattctgtctagatgtcccagatagttcccattctacttggagatttggcttttccaagaaaagctagagcagagcagcccttctcccacaagccctcccacccccgtgcagccacatacctgtacagaatggtaactaagggtgctgtgcccaaccctgcgactagcaaggctcgcagcaagagcacagccctcaactacttgtgccagagtttctcttggaccactccaactcccactgagcccttttgctgctgggctggcaggaaactttccccactccctaaggggcatgtctgggttaggtgctaagtgctgaagagaacttggtcagttctctcaactttgctttgggcaagaatctggtcacctgatgggatccatggtacaggctactgctaaacttggcacagtatcaagtatagtacctccaaggaccagggctgggaagtctttagtgctaacatcccctttagagttcacacatcttgcccttccatgaatgacccctcagtctggcctccccagcctcaaggtccactcaggcacaagagccacagtaccctagatagtgtcacatgacaccgttgtcatccaaggataatacagaccaactaggctacatctgtgatgagcagctagcaaagccgctggtcttctcctaggactaagtccaggtgccttccacaatctcatggtctttcaggtccctggttacttttctcaaaggccatttccaaaagaatacatgccttcacatcacaacctgtactgtgagtccattctagaggtcactgaaaggccctgtaaagagaggacatggatacgggacctggccctgaggttattactggccgtaaggcagagttaatccatacagaaaccagtgtgtccatgtgctctgcacaaaaacagacctgttgtccatccagtccactgacaagagggtttccccgagagccgaagtggactgaagctacagtttttagctggtgcgggccacaggcagggtcagattgagaagaagcaaagctggggaagcagaagttgggagtcttgtgttgctccctcttcctgtgtggtgctctgggtttctgtggatcgtgaaggcgatctcaagagtgtttccctccaaacctgatagctgcctattcctgtctggttggggctgtggaggatgtagttgtatttattgcattgtaatatttttaacatcctgtgacttcatgctagaaattttctattgtttatagaaactttttgtaaacattaaactctaaagcacatctgcatgtccagtaaaaatctcagtttcgtacagaaaaaaaaaaaaaaaaaaaaaaaaaaaaacctagtcttaaaaccagtgacatactccaggttacttcatgagcacccgggactaaaacaggaagaaatgtgactgatgattctggtctttcaagctttctgaaatggtgtgccagttagaaaaggatttctattcctgacatacccagactaggcagcccataccattctcacagtgtctttcgtgtgtggctgctgggcctggcccacaggaattgctactgttctttgttggagctgtcatagcaacatgaacttccctggtaaaccaggagataggtgaagtggcacattcactctagcttgaatgttctctagggttggtgtgctccagaaaccacttaatttgggcaattctcaggagggttctttcttgttgttttgagaccggtctcactgttaccgggtggagtgacattgattcctatgggaatgttaaccagtttgagtggggccctgtttccggggtaacgtttccaccttggggcccagggggttcctagtggggttgccctgcatgggacccttttaaaaaacacttcgggggcccaaatccccatgaaaaggtacccccaaa

SEQ ID NO: 7610 - DNA, 1708 bp, Homo sapiens
cgcttgagcccaggagagtgaggctgcagtgagctgagattacgccacctgcactctagcctgggcaacggtgagaccctgcctcaaaaaaaaataaaaataaaaataaaacactttaattagaatctatttttacctattttctaaatttatttaaatgcttagcaggaagcataaggaaaagccatcggcctccaatacccatgatgacagagggagcacttgagccttgccttccctcctcttaaatcagggtgtgttccgagattacagaacatcacaccttggcgtgatgaaatcatgccaagattctgactctccctttccggtgatactgctcatgatttctcctaatacgcttcaagcaactgttaccacaaaaaatacagtttccgcagggctttaaaggattgagtttagcatgtatatcatgcgttattaaagttcacgtgattcatgtgaaattaactgtcctttttgctagtgccaaaacagtgccttctctgcacactttacttgtttataaagttctcccacatgtccttaaatatcaagggggaaagtatggatattcgcgtagcaataatgccagcaaaggtcattttcattttttagtcatatagatatgaaaataagttcatatagatatgaaattgcttgactttattgttttggggagattttttttccttacatgattatattaaacactttaaaatagccttccggtttctggattttgagaagcctgatctgttattgttgtggttgttggtgtttgtaatattcattattgtttgtatatacacggtttagtcttactgatttcaaatgcattttgttattgctcaacccaactggtaacactgtttgctgggagcattatacttaactttgattcaccatggttgatgccactgccatgatcgctgggtcttaaagagctttccctagccactgacagccccgtggagatcataatcagggccccaggctggttccaggatcaggcagcctatagagtgtgagcatctatgtgtagctacccttgttgggtgggctcttagactgatggggtaggatatgaagtgaaagacttcaaatgcaagtaaggtagtttgggctccttaattccaaacatcccatgagtatatcaagatgaataaggaccaagggacctctgtgactcatagaagggctggctgaatcctgaagtagcatagtgggacctggtctacaatttatgcacatgcactgacagccttgctgtgccacgtgtctcaccaagacccagttgggaaagagcgtcatattgccaacaggttgggtttctctggcctacacctgattaatgggccctttatctttggtgtcccctaggagtgtccagttgttttattgctgtattttgttattgcagtacttaataaaaattgttgatagggcccaaaaccctacagaaattctatgtctgtaaaaaccaacaaaggcattggacttgtgtgaatgtacagggtttttttagtagtaattttaaatttaaatgttttaagtgatcatcagtgttcctttttacttataaagttggattcttttttagaatttgtaataaataaaaactgctgctttaccactgtaaaaaaaaaaaaaaaaaaaaaaagtgtatttttaaaataaattttaatatgtaataataaaaaaaaaaaaa

SEQ ID NO: 7611 - DNA, 2947 bp, Homo sapiens
  misc_feature (2645)..(2645): n is a, c, g, or t
  misc_feature (2647)..(2647): n is a, c, g, or t
  misc_feature (2651)..(2652): n is a, c, g, or t
  misc_feature (2654)..(2658): n is a, c, g, or t
  misc_feature (2669)..(2669): n is a, c, g, or t
  misc_feature (2682)..(2685): n is a, c, g, or t
  misc_feature (2711)..(2712): n is a, c, g, or t
  misc_feature (2722)..(2725): n is a, c, g, or t
  misc_feature (2730)..(2731): n is a, c, g, or t
gacccggtcgcagcgcccggggcggctcctcctcgagcctgggaccgccgcgctcccgccgccgccgcgtgctggcgtgactcccggcccgtgccgcgccctcccgcgtccgcagccggctcggcttcctgcccacccagacgtcgcttctcccgggctcccggtgtcggctccgcgcggagggagaggaaatgagtgcggcggcctcgccggcgtcggagcggggttggaagagcgagaaactagatgaggctcaggccctggcgcggagttgcgccgcccgcagacccgacttccagccgtgcgacgggctgtctatctgtgccacgcacagccatggcaagtgcttcaagctgcactggtgctgtcacctaggatggtgtcactgcaaatacatgtatcagcctatgacccctgtggaacagcttccaagcactgagattcctgccaggcctcgggaacccacaaacaccattcagatctcagtctcgctcaccgaacactttttgaaatttgcatctgtcttccagcctccccttccccctgactcaccgaggtactgtatgatttcagacctttttattgacaactatcaggttaaatgtattaatgggaagatgtgttatgtgcagaagcagccggcaccacattcccacagaatgagccctgaggaggtctctgcacacgatgccttaatttcaaaagagagcaatacaccaaaaatagatcactgctcttctccctcaagttctgaggactctgggatcaatgcgattggggctcactatgtggaatcgtgtgacgaggacgcagaagaaggagcagaactgagttcagaggaagattacagtccagagagcagctgggaaccggatgagtgcacccttctctccccctcgcagtctgacctggaagtgattgaaacgatagaaacgactgtgtgagagtccagacaggaagccacagcctcggacccacgccgagcttttgtacctttgtctggtggatccttttttccaatgctgttgatattttctacccaccccgccccgctccaaccaacaaccgtagcagttcagtggtatgctgattagcttctctccgtcttacaactaagacattctttttattataaacagttttcttttgtatcctgacttactttctatgtagcatctggtgtcatgaattgtgaccccgccttaatttcactgggagatttgaaggcggtgaagtgatggtcgcagagaatcttggatcagattgaggaggtaccgaaagggaaggagccggtgttttctcggtagccagtccttcacagagactcttgccattccctttggcatgttcacaggcactcccgtcctgtcctgcttgtcctacgcaagtagcactccctactgagtgtgcactggtagatgccgtttcttcccttccccttctccccacacctgcactgggtctggatcagagctgcctcggcttacttctgggaggtcactggaggccagctcagcccatggtttgtggccagtgtctgtacaaggctccgtgactggggctgagctaaacattcacatgagaagagatgacctcatctgtctcatgctcaatccagccttagctgagcacctgtcccctgcagggggctgtggggacacagcatgaataagacctgattcccaccatgaaggggcccacagtcctatatatgacacattcaactcatggcacccaaaaagctctgggaacccaggggaaggatgaggtttacttggctggggctagctggggaatgtgtttcagcatttgagctggcttcttggtgggttccccaacatttttctgcttttaattgttcttcaagtctgggaaaaaaaaaaaaaaaaaaaaaaaaaaaaaaagaaactcccaggagacagcagcctagttttcgagtgtgagcttgtgcttgtgaaagctaaccatgctaaccaccaaggcaaagcagcacagtgtgaatagaacagagcgggatcaagaatttcacagaagacaggtcagctgaggggcctgcacacacagggtgttgaggaaccacagatgggcgccgagaggcctgccttttgcctggcccaggctcacccccaccttgggcctcacctcctccaggaagccttcccagctacccgaagctcaggtggccttcttgcaggtccccgtagcaccctgagcctgtaccttgggtggcacttgttatgctatcctgtgctagccgtttgtgcctcgtctcgctgttagattgtgagttcccatgggcagagacccactgtcgttccccgtgtgtccccagcccggtccctgtcacatttgttaaatgaaagaacaatgaagcccagtgtaacgtcagtccacagaaatagccacagcttccagtggtggccgtagacttggctcggaacttagtggcaccagagtaactctagtcagttacagtaaaatccactgtgtgtggaaggcagaagctagcggttgtatcccaagcatcttttgtatttgtctttatactttgctgaattctctgaaatacctattactgtatgttgcttttctaaataaatgtattgtgaaaccaaaaaaaaaaaaaaaaaaaaaaaacggaaaananaaannannnnnaaaaaaaaaanaaaaaaaaaaaannnnaaaaaaaaaaaaaaaaaaaaaaaaannaaaaaaaaannnnaaaannaggggggcgcccccccaaaaataaccccccggggggggccacattttttccgcccccccgttttttttttaaaaaggggggccccctaagggggggcctattaaaaactggggccctgggcccccctttttttcaaaccccctgggcgggggaaaaatccgctctcttcgggggactttttggggggacccccttctttcttgggggggggggaca

SEQ ID NO: 7612 - DNA, 4070 bp, Homo sapiens
  misc_feature (2790)..(2806): n is a, c, g, or t
agcggattgggggaagcgcccgcgctttcggagggttccgttaaaatggcgccctggtggccggtgtggtgcccgcgccttagcctgtcgaggagcatgggagcttgctgtgtgtgctgcaggaagggcgcgggccgcggtccctgcgcgtgcggcggcagtggcggctctgcccggaccaccgtgcacggctccgggcgaggatggcgaccccggaccagaagtcgccgaacgttctgctgcagcttgtgctggcaggactcctgggcaggagcgaagctgatgtagcccagcagttccagtatgctgtgcgggtgattggcagcaacttcgccccaactgttgaaagagatgaatttttagtagctgaaaaaatcaagaaagagcttattcgacaacgaagagaagcagatgctgcattattttcagaactccacagaaaacttcattcacagggagttttgaaaaataaatggtcaatactctacctcttgctgagcctcagtgaggacccacgcaggcagccaagcaaggtttctagctatgctacgttatttgctcaggccttaccaagagatgcccactcaaccccttactactatgccaggcctcagacccttcccctgagctaccaagatcggagtgcccagtcagcccagagctccggcagcgtgggcagcagtggcatcagcagcattggcctgtgtgccctcagtggccccgcgcctgcgccacaatctctcctcccaggacagtctaatcaagctccaggagtaggagattgccttcgacagcagttggggtcacgactcgcatggactttaactgcaaatcagccttcttcacaagccactacctcaaaaggtgtccccagtgctgtgtctcgcaacatgacaaggtccaggagagaaggggatacgggtggtactatggaaattacagaagcagctctggtaagggacattttgtacgtctttcagggcatagatggcaaaaacatcaaaatgaacaacactgaaaattgttacaaagtagaaggaaaggcaaatctaagtaggtctttgagagacacagcagtcaggctttctgagttgggatggttgcataataaaatcagaagatacacggaccagaggagcctggaccgctcattcggactcgtcgggcagagcttttgtgctgccttgcaccaggaactcagagaatactatcgattgctctctgttttacattctcagctacaactagaggatgaccagggtgtgaatttgggacttgagagtagtttaacacttcggcgcctcctggtttggacctatgatcccaaaatacgactgaagacccttgcggccctagtggaccactgccaaggaaggaaaggaggtgagctggcctcagctgtccacgcctacacaaaaacaggagacccgtacatgcggtctctggtgcagcacatcctcagcctcgtgtctcatcctgttttgagcttcctgtaccgctggatatatgatggggagcttgaggacacttaccacgaattttttgtagcatcagatccaacagttaaaacagatcgactgtggcacgacaagtatactttgaggaaatcgatgattccttcgtttatgacgatggatcagtctaggaaggtccttttgataggaaaatcaataaatttcttgcaccaagtttgtcatgatcagactcccactacaaagatgatagctgtgaccaagtctgcagagtcaccccaggacgctgcagacctattcacagacttggaaaatgcatttcaggggaagattgatgctgcttattttgagaccagcaaatacctgttggatgttctcaataaaaagtacagcttgctggaccacatgcaggcaatgaggcggtacctgcttcttggtcaaggagactttataaggcacttaatggacttgctaaaaccagaacttgtccgtccagctacgactttgtatcagcataacttgactggaattctagaaaccgctgtcagagccaccaacgcacagtttgacagtcctgagatcctgcgaaggctggacgtgcggctgctggaggtctctccaggtgacactggatgggatgtcttcagcctcgattatcatgttgacggaccaattgcaactgtgtttactcgagaatgtatgagccactacctaagagtatttaacttcctctggagggcgaagcggatggaatacatcctcactgacatacggaagggacacatgtgcaatgcaaagctcctgagaaacatgccagagttctccggggtgctgcaccagtgtcacattttggcctctgagatggtccatttcattcatcagatgcagtattacatcacatttgaggtgcttgaatgttcttgggatgagctttggaacaaagtccagcaggcccaggatttggatcacatcattgctgcacacgaggtgttcttagacaccatcatctcccgctgcctgctggacagtgactccagggcacttttaaatcaacttagagctgtgtttgatcaaattattgaacttcagaatgctcaagatgcaatatacagagctgctctggaagaattgcagagacgattacagtttgaagagaaaaagaaacagcgtgaaattgagggccagtggggagtgacggcagcagaggaagaggaggaaaataagaggattggagaatttaaagaatctataccaaaaatgtgctcacagttgcgaatattgacccatttctaccagggtatcgtgcagcagtttttgnnnnnnnnnnnnnnnnnctcctgaccgagagtcttcggtttcttagcttcaggctggacttcaacgagcattacaaagccagggagcccaggctccgtgtgtctctgggtaccagggggcggcgcagctcccacacgtgaagctcgcggtcctcccagggagctgcgggtgatgttcgttgcactgctagacacgaaattcccattgacgtcctgcaggaactgcatgctgcaggtgtcctgcccttccgcccacgagtgcgccatgtttcagcggagcggcgtgtgggagaagccacgtcgtgtttcacatgtcggagtcgaatgcatttgtaaatccctaagtcaagtaggctggctgcactgttcacatttgtctctaaaagtcttcatcgctaaaagataccataatttgctgaggcttcttaagctttctatgttataatttatatttgtcactttaaaaaatccatttcttttagaaaaaattagggtgataggatattcattagttaagatggtaacgtcattgctatttttttaacatcctctttagaggtaatttttgttaacataaccaaaaattaaattgaaacaaaatgtcccaactaagaaaatatatagagcattttatttttttttagtgttgtaaaatattaacctctgtgagatcctttgtatcttaatgcattacctttacacatatttattcttattttctctcctttcagagtttacatttttatatttaatttactatttcagatttttaaaatagtatagaaaaaagtaggagtgatagagaacaaaaatactcttatacagtgcaacccaaataccgcgaatgcatcagctaaagcagcgtgtaaataggagtgatgagaaagttaatggagtattttattttcaaagttcctgataagcattggaaagaaatcgacatggataatgaagatttcctttttccttgcctattttttcattgtaaatatttatatactactgaccaagatgttggggtgggggggattgttttttgtaaaaatgtcattatcaggtcacataaatctgcctttatgttgcataagtgaaaatttagaaaattaaaagcaattatctttcaaaaaaaaaaaaaaaaaaggttaaaattccgaggggcaggtaggtaccagtttgtaaagggcctagggggttaagaagagggggggtaaagggggggaaggtgattggagacctctggggaatggaacacaaaaggagaatgtattgaaatcgtgatgta

SEQ ID NO: 7613 - DNA, 1895 bp, Homo sapiens
  misc_feature (424)..(466): n is a, c, g, or t
ggcacgaggcccccgtctagatttaaagcgcggctgcgcccggcttctgacgtccattgaatcgcgcgggcggccggcggcgagcgcggggctgcgccgggatcgctgcgccctccgccgctggcctctgcgacgcgcgccgctcgcccgagccacccgccgccgcgccggctccccgcgccgctgcgctcctcgccccgcgcctgcccccaggatggtccgcgcgaggcaccagccgggtgggctttgcctcctgctgctgctgctctgccagttcatggaggaccgcagtgcccaggctgggaactgctggctccgtcaagcgaagaacggccgctgccaggtcctgtacaagaccgaactgagcaaggaggagtgctgcagcaccggccggctgagcacctcgtggaccgaggaggacgtnnnnnnnnnnnnnnnnnnnnnnnnnnnnnnnnnnnnnnnnnnngcccccaactgcatcccctgtaaagaaacgtgtgagaacgtggactgtggacctgggaaaaaatgccgaatgaacaagaagaacaaaccccgctgcgtctgcgccccggattgttccaacatcacctggaagggtccagtctgcgggctggatgggaaaacctaccgcaatgaatgtgcactcctaaaggcaagatgtaaagagcagccagaactggaagtccagtaccaaggcagatgtaaaaagacttgtcgggatgttttctgtccaggcagctccacatgtgtggtggaccagaccaataatgcctactgtgtgacctgtaatcggatttgcccagagcctgcttcctctgagcaatatctctgtgggaatgatggagtcacctactccagtgcctgccacctgagaaaggctacctgcctgctgggcagatctattggattagcctatgagggaaagtgtatcaaagcaaagtcctgtgaagatatccagtgcactggtgggaaaaaatgtttatgggatttcaaggttgggagaggccggtgttccctctgtgatgagctgtgccctgacagtaagtcggatgagcctgtctgtgccagtgacaatgccacttatgccagcgagtgtgccatgaaggaagctgcctgctcctcaggtgtgctactggaagtaaagcactccggatcttgcaactccatttcggaagacaccgaggaagaggaggaagatgaagaccaggactacagctttcctatatcttctattctagagtggtaaactctctataagtgttcagtgttgacatagcctttgtgcaaaaaaaaaaaaaaaaaaaaaaaaaaagaaaaaaaaaaaaaaaaaaagtccaaaggggtaaatataggggtatgcgcttattaatttgggggggggaaaacttatttctttaaggggacccttggtcctaaaggcctctctcccaagggccaccttgtgttactcattgggaccagggagagggcatccattggggaggtctacgggatgaggcccatagtggagactggtagactttcatttctataccggggtcaggttcataatgctatacctaacatgtctgcttgagtgtatacctggtctcgaaaaatttatcgcgaaggagagcgcggtatcaatggggggctctgctggtaagaaacggcttttccttgtaccattaagtccttccttagattcttcatcatgtgtcccttcaattcactggtagactcttcctttcaaagctggtggcggtctgagtgattagggtccggggcggtggaaaaatggccggggggggcaggccgtcgcgggttatttgtcaagggggaaaggttgagagccctttgggcaagtgaggaggcatgcgttgacaagtgggaaggagccgtggcgctagact

SEQ ID NO: 7614 - DNA, 2727 bp, Homo sapiens
gagtacctccatagacaacactattctcacagtttgctgtgagaatgaagtaaccctcgttttacaaatgaggccaagctaggagagctgaggtctccccgagtcagtggctgagcttggattggaacacaggtctggctgtgagcaagggcagggttcaggccactctcagacattttttgttgttattttctggtcatggagacagaacttgcagaggaaaacgaagggtgggctgagcacagtagctcatgcctgtaatcctagcactttgggaggccaaggtgggtggatcacatgagcccaggaatttgaggccagcctgggtaagatggcgaaaccccatgtctacaaaaaattagccaggcgtggtggcgcatgctggtagtcccagctactctggaggctgaggtgggaggatcgctggagcctgggaattcaagactgcagtgtgtcatgattgcaccactgcactccagctgtaggatggagtgggacggaccttgtctcaaaaagaaaaagataaaaaaaaattaagggtggtcatggggcactccctgcccagggcacagctgtcccccaggtaccagggagggtagaaagcccacctcagagcatgtttccaaaatatctgacaagtgctagagccgggggtggccatagaggtggctgacctgagggcggaattaattctctatcatatgggagcagcaggcactgactgtagggaaccgcatcctcagatggcatgtcctggggccaagaccccttcccaaagctgggaacatagactctgtgggctgggtgctctatagctgggccctgaagaatggagcaaagacctgtggcaaggataaatcaaggtctgcagccgggggtggctgtgggctgtgattgtgtttgggggcggccatgtgtctctgaccctgtgttttgccccaactacagcacactgggatgagaaattccaccacaagatggtggacaaccgtggcttcatggtgactcggtcctatactgtgggtgtcatgatgatgcaccggacaggcctctacaactactacgacgacgagaaggaaaagctgcaaatcgtggagatgcccctggcccacaagctctccagcctcatcatcctcatgccccatcacgtggagcctctcgagcgccttgaaaagctgctaaccaaagagcagctgaagatctggatggggaagatgcagaagaaggctgttgccatctccttgcccaagggtgtggtggaggtgacccatgacctgcagaaacacctggctgggctgggcctgactgaggccattgacaagaacaaggccgacttatcacgcatgtcaggcaagaaggacctgtacctggccagcgtgttccacgccaccgcctttgagttggacacagatggcaacccctttgaccaggacatctacgggcgcgaggagctgcgcagccccaagctgttctacgccgaccaccccttcatcttcctagtgcgggacacccaaagcggctccctgctattcattgggcgcctggtccggcctaagggtgacaagatgcgagacgagttatagggcctcagggtgcacacaggatggcaggaggcatccaaaggctcctgagacacatgggtgctattggggttgggggggaggtgaggtaccagccttggatactccatggggtgggggtggaaaaacagaccggggttcccgtgtgcctgagcggaccttcccagctagaattcactccacttggacatgggccccagataccatgatgctgagcccggaaactccacatcctgtgggacctgggccatagtcattctgcctgccctgaaagtcccagatcaagcctgcctcaatcagtattcatatttatagccaggtaccttctcacctgtgagaccaaattgagctaggggggtcagccagccctcttctgacactaaaacacctcagctgcctccccagctctatcccaacctctcccaactataaaactaggtgctgcagcccctgggaccaggcacccccagaatgacctggccgcagtgaggcggattgagaaggagctcccaggaggggcttctgggcagactctggtcaagaagcatcgtgtctggcgttgtggggatgaactttttgttttgtttcttccttttttagttcttcaaagatagggagggaagggggaacatgagcctttgttgctatcaatccaagaacttatttgtacattttttttttcaataaaacttttccaatgacaaaaaaaaaaaaaaaaaaaaaaaaaaaaacaaaaaggaaaagcatataaaaacccctatataaaaatttataacacatttttctccaccccccccccccatcacaattccggcgaggtataaaccggggaacaccagtggagacgcgaatgacccaaatacacaggaatctcgcaaaagagatatatcgcagaggctcaaccgtttaacaaacgcgccctttgagagtaaagtgggaaaccgcgatcaacagaggcaaaaaaaagagccccaaacggaggacatggagaacacaccagacaacaacaagccccgcgagaaaagcaacgaagctctcgcaaataagaggggagagaaaaccccgagtcagaacacagacggacacacacacaggtctgcgacgagatgacacaaaaccgacacccccctccacccaccccaacaag

SEQ ID NO: 7615 - DNA, 6402 bp, Homo sapiens
  misc_feature (355)..(395): n is a, c, g, or t
  misc_feature (1624)..(1638): n is a, c, g, or t
  misc_feature (1642)..(1677): n is a, c, g, or t
  misc_feature (1759)..(1790): n is a, c, g, or t
  misc_feature (2407)..(2424): n is a, c, g, or t
agtccatgtaatgtaaccagttcgaaaaaagtcttaaaaatgaattgttgactttaaacacacaatcttcggagccgctcacaacgtccgtagaagcagactcctccccgctcctggggaaaaccctgcctaatatttataacgttatgacatactgtaatactcacaaggtggttgtagaagtataaacacgactggagttatctgattggctgctgatttaaatttccatttcatcacagcaataagacactcggggcggtgcattttctgtgaaatgactactgtccggggcccgaggtgctgcctcgcacaatgcatcaaaggaggttgtgtccgtggtcgtaacctcttnnnnnnnnnnnnnnnnnnnnnnnnnnnnnnnnnnnnnnnnnaaaataagttcacttccttgggcaccgccacccaccctcagcaaatgacaaggctggagcgcagctcccaccgcacagttatttgcaaagtcccaggtgaactcgtggcgagagaaggaaaatgcgcgtcccgggcgcgggagtcagaaataccatcagaggaggggtactgtgactttaatagtaggccaaatgagaactcttattgctatcaacttctgcgacaactaaatgaacagagaaagaaaggtattctttgtgatgtcagcattgtggtaagcggaaaaatcttcaaagctcataagaacatcctggttgcaggcagccgtttctttaagactttatattgcttttcaaacaaagaaagccctaaccaaaacaatactacccacttagatattgctgcagttcaaggtttttcagtcatcttggacttcttgtattctggtaacctggtgctcacaagccaaaatgccattgaagttatgaccgtggccagctatcttcaaatgagtgaagttgttcaaacttgccgaaatttcattaaagatgccttaaatataagcattaaatcagaagctccagagtctgtagttgtggactataataatagaaaaccagttaatagagatggtctgtcttcatcacgggatcaaaaaattgccagtttttgggcaacacggaatcttaccaatttggcaagtaatgtaaagattgaaaatgatggttgtaatgtcgacgagggccaaatagaaaactaccaaatgaatgacagtagttgggtccaggatggatctcctgaaatggctgaaaatgaatctgaaggtcaaacaaaagtgtttatttggaataatatgggctcccagggaattcaagagactggcaaaacaaggaggaaaaaccaaactacaaaaagatttatttataatattccacctaataatgaaacgaatttagaagattgctcagtaatgcagccacctgttgcctatccagaagaaaatacactactcatcaaggaagaaccagatttagatggtgctctactctcggggccagatggtgataggaatgtgaatgcaaatttattggctgaagctggcactagtcaagatggaggtgatgctggtacttcacatgatttcaagtatggtttgatgcctggtccttcaaatgatttcaagtatggattgataccaggtacttcaaatgatttcaagtatggattnnnnnnnnnnnnnnnaaannnnnnnnnnnnnnnnnnnnnnnnnnnnnnnnnnnnaaaacaagaaacctgggaaaatggtgaatcatctctaatcatgaacaagttaaaatgccctcattgtagctatgtagccaannnnnnnnnnnnnnnnnnnnnnnnnnnnnnnnttcacacaggagtgagatcatttagctgtgatatttgtggaaaactgtttactcgaagagaacatgtaaaaagacattccctggtgcataaaaaggataaaaaatacaaatgtatggtgtgtaagaagatcttcatgttagcagccagtgttggaataagacatggatctcgacgttatggtgtttgtgtagactgtgcagataaatcacagccaggagggcaagaaggtgtagatcagggacaggatacagaattccctcgggatgaagaatacgaggagaatgaagtaggagaagctgatgaagagctagttgatgatggagaagatcagaatgatccctctcgatgggatgaatcaggagaagtttgtatgtctctagatgattaactgacctactatactcctcaaggatgctgcatttggacctaatatgaatcgacaatttggattgttgaacttgaaggcttgcaaaatatggtacatgctggatagtagttatgttgctgtgaaaactgtagggtcaaagccttatagcaaaaaaaatttttttttatatttgcacaggactatacagcaaacaaccatgtggttggattacatggagtccccacatannnnnnnnnnnnnnnnnntaaaatattttttatttataggatatacagtaactatttgggtcctatgaaaatagtccttaaagagcttacattcatgtgctactttaacatgaatggagaaaatccgtttatggaagtacagtgacaattgacccaatcactctgtccatcaaaccactcaggctagtttgtactagtagagttttgtttctatttttatttttattaattttattttttttaatacagattttcagtgaggggctttttcaatcccattggttctattttcttgtatttttccatttaatttgcttcataacttaaaccaagtctcttctagtcttaggtattatttctcgattttgtgctgatgggcatgtttataagaactggactttttgacatgaattttactacttcacaaatgaagaatgatgttatgaagttaccgtggcgaagttgacaaataccactaaaatgattatgatttagaagtaactttcttctgctgctctaatctgataaatggttactatatgatattttctgacatggtatttggttttgggtatctgttactttggcactattcttgtttgcctctttatttttgccagtgtactatacctcagtcctatttgaaagacctaattgaaagaaaaatcatagaaataagtaaaatgatttgttttataatttatccaccatgtccagtttggttagcttgttatgcaatataagtgaaatatcaggtttttacccgtgtcccttttatcatgaaaattaacacaaaatgtgcattctcttttgtttcatacttagcgggatattgattgttttgaaattatgatcaatacttaattcatttttttctgtccttgaagtcactacaccttgatacagtctttctagtagtcaccatgattcaacagtctcaaaaatcttacaaataaaattctgagaagctttattattctataaattcttcagggtacaaagggtgacatattgaggtgaaattgtcagatttacttagcctggtgacatgaattagctgattgtggaactctcagcagcatttcacgtattgttaacatgtatggcatttattagcatattgtatattatataagattgagggatgtcatattttcagctttcttttaaataaaaattgagtatattttcctattttatatcaggtaactaaattatgctagttatgtggaaaaaattgcaaagatgctttgacagatataatccctttggtgctccatctgatcaaagttgaaaagttgatgttttttaagagacaagctttatcattgtctctgatttcagtagaataatggtttattgttagacaatgatgtttctgcttggataaatcaaagataaattacagttacatggttagatgcatcttttgtcatctatattgtagtttctacataactgtaaacctgacagataagaatagtttcggtttgatttttgtttaaaacagatgagtacttcttaatgttctagacaaatgagtaaaatgtatttctggtagaaattagttgggcaaagatactatgaatgaaaaagtattttaaacgtaaaatgttctttgtgaatatgtaagtatagtataaagatttctttcatcccatttatccccttcctttaaataaactagtttacaattggtagatctgtctatatataaatatatattaaagaacaaagatatatatctaaaaatcacctaaatctgctttattagactacagttcacttattgcatagaaactggacttggctttacattcttaatgtacttttacttttcctcaagatatgaacttactctcttgaagctgaattttcttttactacttaaatcatttatgtatatctggtaaattatgaccaaatttttgttagattgcatacagtaaattgaaatacacacttggtacactacgggattgttgtgcttttgtttggttttagttggaaataaggtttgatgtagatggcttgttactgttaatttaaaatattctataattgtccattactttatgttgtgttgtgacagatttggctatatttttagtcaattgaaatatgatactttaaaagtttgtttttaggtaatccaaaggaaaagtgtttatactcttgaatatattagcctcagcctatataaaaatttctttgaagtaaacattttaccggaaacagaattgacagatttttctacttgctgactgcctaacttattttgtttcatgatctcgagggactgccttttcccatctagatcttttaaaaaaatagttttagtactaaggtatactactggacatttctatttttttaagtgtattctttttctgacttacagtaaaatttcaggaagttgatagatactaagaacttatgattggtctcagaggtaacaatgaaatactcataattttgtctgtggaactctggcagaattatgttacacatttggcgaagttgtctcttgtaatttatattttaaatgaaaaagtattttagagcttttaatgaaggggaagagtataaactttctttcatattcactctgtagttacagaccgtctcataaatcaagattgtgcattattagagttctcagagacagatacttccatatggacccctgttcatttttcttatttactagatattttgctaaatttagcacactagcaattaagagtttaaaaaagaagaaacgttataggaaagggaaactgaacagtaatgagtagctttgaaattggggaaaacacactagctgggttaggtacagctatcctaatggagaagagtgagctaaatgcgttaattcatgtaaagtgcttagaacactggtacataataggtgcataacacatcttaaagttgtttaataatagataagaaccaagaggaaaaagaaataagaaaagatgggggaaaggaaggagaaaataggaaatgaaaggattaggacttgggcatttatattaatacaaaatggtgtaaacggcctgaatatcactgtagtagtatcatacgggggaaagtgtgatggaaaataggtttaaaaatcttaatttttaaaactttagtaagctttatttatattttttaggattttctgaacatagcatgaagggtttagattcatttttctgaaaaacgattaaaaaaactaccaattttttctttggagtgcccacacttgccgttgtgctgtatacatgattttaccttaatcctctataaggtaggtgctaatggtctccattttatagatgaggaaaggctcagagaacattcacgaaacttggctaatttaacacagctgtgacagagctcgaatttgaccacgtcctgattctgaagcccatactctttcaggcaggctctattgctgcctccattaaacaactcttgtagaaattttcagctcttaatggagtctatggatcatatattgcctataagacagcctgtgttcagaattctcgagtgtctatcgtcaccgccaataaatttcttaataattctttcttcataaagcagtcgcttggccacttgacctatatgaaaggacacatcaagtgtcgccacatggtccctaacctgggctgtggcaattgcgactgttctatcaacagaatgggttcactctgaagacgtagatggaacagcccagtatatgggccgatacagtacacaagattcctaaagctaactatggcactaataatcacacgtggaaacacaagcgggggctaagcagcgtacagggacgtcacatgggacaggcagagaaacgcggcgagaacatacggcccaacgggaagcaacaccgcgcagacgccaagcggggcagggaaaggcgagcaacaacaagtgccagaccaaagtagagaggggcccaagtggagaaaaccgatggcgacacaagcggacacaacg

SEQ ID NO: 7616 - DNA, 1229 bp, Homo sapiens
tcgacccggattccggttccggtgggctccatcagcaagctccagtgctacgtgtccctggcattttaggtgtcggttgggtaggcagtcatggatcaggtaatgcagtttgttgagccaagtcggcagtttgtaaaggactccattcggctggttaaaagatgcactaaacctgatagaaaagaattccagaagattgccatggcaacagcaataggatttgctataatgggattcattggcttctttgtgaaattgatccatattcctattaataacatcattgttggtggctgaatacattttggaagagagtttttcatcttagagattggtgaacaagtgtgagggtgtgagaaactcacagaatacaaatttgcctgtatgttttgtgggtttttttttttcctttcaagatgttttctatttctaaattaaagtaatttcaaagtaaaaaaaaaaaaaaaaaaaaaaaaaaaaaaaaaaaaaaaaaaaaaaaaaaaaaacaaaaccgaataaccccataaacaaaaacccccccccaaccacaccatccaacaataaacatcttacctcccccccccccttttcccctctttcccccccccctatcttcccccttctccctcccccttttttcccttcgcaggcgccggtctccctcccccaccccccttcttggaggggcgatccccatcctacacaaccccccccctttttcgtcttccaacaccctgtttctcccccacaatattcccctcctaaaacaaaccccaaatgcccccccgccccgccctccttttcccacctaacccctggttggcccgcccccgcaaaccacaccccccccccgtgtttgcacttcctctgcggcgacccataccactttttcccttccgtcgggtgccccgattctcccccgtttacaacccccttctcctaagtcccccttcctcttcccccccctctccctttttactatatttcccccgccctctcactgtattgcccccaattattctctccccctgcccttccttcccaaatatacctttctcccccccccgcccctattttccccccaaatatcccccccccgcggtcgtctccccccccccccgcttttttaccttcttttccccccctctcgcgcccctttttttcgccccccccccctccttccccccgttttgcctatccccctccccctttcttgctgtcccttttcc

SEQ ID NO: 7617 - DNA, 985 bp, Homo sapiens
ttaccgggcatcccgtgccacgcgtccgcgctgcgccacatcccaccggcccttacactgtggtgtccagcagcatccggcttcatggggggacttgaaccctgcagcaggctcctgctcctgcctctcctgctggctgtaagtggtctccgtcctgtccaggcccaggcccagagcgattgcagttgctctacggtgagcccgggcgtgctggcagggatcgtgatgggagacctggtgctgacagtgctcattgccctggccgtgtacttcctgggccggctggtccctcgggggcgaggggctgcggaggcagcgacccggaaacagcgtatcactgagaccgagtcgccttatcaggagctccagggtcagaggtcggatgtctacagcgacctcaacacacagaggccgtattacaaatgagcccgaatcatgacagtcagcaacatgatacctggatccagccattcctgaagcccaccctgcacctcattccaactcctaccgcgatacagacccacagagtgccatccctgagagaccagaccgctccccaatactctcctaaaataaacatgaagcacaaaaaaaaaaaaaaaaaaaaaaaaaaaaaaaaaagggcgataaaaatcttccccaggggggcccaagtttagggttaacccagtttttttgtacaagagtggggccccttatgggaaggcagtattttataagcgaaggggacgtggggcgatggttttaacaaagcgtttcggtgacgttggaaaaaacgttgctaagcttggggactcttgtgtggagggaacctttaaattttggggggtggtgtgacaattgtggagacaacattacctaagagagatttaagggctcaggggtaattataaaattttcaagggtgctaatgtgtgtaaccaagcgtgaaaatgattgcgtgttaaagtttggtagggagtattaaattttagaatttttgcgg

SEQ ID NO: 7618 - DNA, 2734 bp, Homo sapiens
cggttccggaagacttctcttccttgagtggatgtgtcattttaacttcagagacaaccgtgcattttcagcctgtggtcaagcatacttgcctggccgtaggggcccaaattcattcactgccgcctctgtttaagcaaattgcattcgggccagttcacttcacaagttcggttcagatttcaccttgacgattgtagaaggatagttagttttggaaggaggggtatgcagatcttccccgtctaatactcatgcttgctttggattgatgtcacaactagaggatataacaggaggtcagtttaaaaatagcaaacagtctatcacatggaaactattcaatttagtgatggcttatcaaagacactccaacttgtcttgcccaaacttccctgtcttcacagagccagggggctagatttcttgccactttttttctgaaaggcaaatgcatgacttttattcttttgggtctcagtgtgtttcttgaactgtgtgacttcaatatctgtgacaagtttttattttcccttagttgtatgtgaagaatttattctatagtcgtgatcatgtagtcctccattgtttggaagtgcagacccatggattcctatgcagcagatgggggttgtctgtttgtgcacttttttcctaagctgctgaaattcctccgatgtgaatgggccatagtaatctttgctctccgtgcgtgactgtaagcatggcctccagtggatcagagaaagcagctcagtgattgttctcatggccaaaaataaagcacaagggttaccggaattgaatgagccctgttcagggcagcacggggcatctgcaccccagctgggcagcatgatccttgtattcaactatactcttctggcagtagttggtggcaagcattcgcgtgcctctgtcacaaccatacgtagaaacacattaggtatgtctggaaagctacaaatcccacatccaagcacagtaccgtctgcttcatctgattaacacacacacaagaaagaaaaattacacccacagaaaactgagtatgtattgtagaaatgtagaggaaaaataaaaatattttttcaaatgtaattacttttaatatatgcttgtggaaggtctaatacaatgtatgctgtctctgtaatttttgctgtaaataactggagacggtgagtacactgatttttctatgtctctgtttaagcataagactttgtaacaatttttttagagggggaaaatcaacaaagagcaaatatgtacttgcttcctttctgcgtgttatgtacttctcagttttttaatggaaactggttgtaacagtttaagcatcttgacgggtcattggtgttaagtgtatgcttctttttgtaatatgactgagaaagggacagggctgtcaattaaatctgctccaaagaatttgtattgaagattggcctaagacctgcaaactccatctataactagaaaatacgaaaaaggaaaattaaaaaaaaaagttgcctgagttaagtcatctttccttgtagcaaatggctttgtccaaatcctttctgcatggaatagcttaaggaaaacaaactccgctttctgatgaacaagatatttttgtacacatttatttcttgttaataacctgaggtcagaccactcatttgctgaagccataactgaccttcaccaaataaatgttgtaaagaacctaggggagggttggggagagactgagagggaggaaaatccaaggtgtcatgagctatagcaacacaggcaggagcaagttgttgaaactgatgcttttcctgcatcccaaatatgactttaaaaggctagtattttatgatgatcgatttataatgataaaaagatatttagatttaaatgagacattccaatatttttgaaatccctaacaatgcttccttgcttttaggattgagagaaatgattttcatatacttccaacattcagagatttaatgtttttaccttagctccagcctacgcttgtaaagtgaagagtgattctaagtcccgtgaaaccgtgggctgcctggggcttggctgtgcccactaacctactgcgcctggggggcagcatgggaggggtacagtttgcatctcattagcatgcacaccactgttggcaatgcataaaagttgcattgccacaagtatgtaaaataaaaatattcactctaaaaagaataataattctacttttttaaaagaataatgtctcttatagtcaccattgatttttctggagtttaattacattattaccatgtattcttattggcctgtagaggaaaaaggcaaaccacaaataaacccagtgacatatatagttttaaaatctacaattttctgatctctctctccttgtttaatatataagccctaatttctgtgtatgtgagtaaaactgcagcctgagtcatttaggaagtaagtattgagtttttttaatcataaatatactagaataaaacagcactccctaacaattaaaaaagagttttatattactttagaatgtaataggtttttgtccttattttatgtcctgtaaattattagttcaatactgttagcattcccggataatgcacacatgatttctgaatgttttctgtaaatgacaatcaatgtttatgaagttccctcctttaatgctgaacaaaattaaaagaagaaaaagaaaaaaaaaaaaaaa

SEQ ID NO: 7619 - DNA, 1113 bp, Homo sapiens
ggtgggcaaaggcatcttcctctgggaaggactggcacaagcacttggtccctgggttgtgtgcctgggaggccgggatcagggctggccctctttctccctggcaaagcaaaacctcccttttactactatcaaggggaagtaacttgaaggtgcctgtggcaggcagcaccttgagccaacaggaaccattgacatgcgaggcccagggcaggcagactgtgcagtggccattgggcggcccctcggggaggtggtgaccctccgcgtccttgagagttctctcaactgcagtgcgggggacatgttgctgctttggggccggctcacctggaggaagatgtgcaggaagctgttggacatgactttcagctccaagaccaacacgctggtggtgaggcagcgctgcgggcggccaggaggtggggtgctgctgcggtatgggagccagcttgctcctgaaaccttctacagagaatgtgacatgcagctctttgggccctggggtgaaatcgtgagcccctcgctgagtccagccacgagtaatgcagggggctgccggctcttcattaatgtggctccgcacgcacggattgccatccatgccctggccaccaacatgggcgctgggaccgagggagccaatgccagctacatcttgatccgggacacccacagcttgaggaccacagcgttccatgggcagcaggtgctctactgggagtcagagagcagccaggctgagatggagttcagcgagggcttcctgaaggctcaggccagcctgcggggccagtactggaccctccaatcatgggtaccggagatgcaggaccctcagtcctggaagggaaaggaaggaacctgagggtcattgaacatttgttccgtgtctggccagccctggagggttgacccctggtctcagtgctttccaattcgaactttttccaatcttaggtatctactttagagtcttctccaatgtccaaaaggctagggggttggaggtggggactctggaaaagcagcccccatttcctcgggtaccaataaataaaacatgcaggctgaaaaaaaaaaaaaaaaaaaaaaaaaaaaaaaaaaaaaaaa

SEQ ID NO: 7620 - DNA, 1634 bp, Homo sapiens
  misc_feature (51)..(51): n is a, c, g, or t
ctaaacactgctctagataaactgctcaagttcatttaactcaaataattngaatggccaccccctaataggggttcctcattttaaagatttgttagaccaagaagcaagagagtattcctagtattcccaccatgaaaagtatcattctttgcaccaaatgttaacaaaatcattttgttctcctgcctcttctttttgtaaaaggtgtttgatgtattaagtggggtcactgaattccatttgtggactgaaaagtattcaatccacttttggggttcagagataaaacattttttcccaagtagctggggctcttccattttgcagataagtcaaataatcaacactaaaggaggctaaactgttgatgaatgagagactccctgactgctcagatgaccctagccacactgaaagggcacctacaggtcagtttagctacctcctgtctttcccatgcaaagctgataacacagttgtctttggacttgtagacctcttggattccaggtgtgatggagtaaagtgtgggattgttgttttgctgggatgcaaataactaaatgctttggtggttaattgctaagagtaaatactactttagccatccaaggccaccttctgcagcaaaaggcttttgtggagaaccttttatgttcccaaccactttttgaatggtgtgccatttaaaaatccaggccagatcctattataaccaactctcaggatttacagccttcagttgtactagaattttgtttttatccaatactcattaaataagtgggccacttaggaagattcaaaatcttggttattacatgaagtttgttatatttcttgtcaacagtattgaaatgtaatatgtatgtgttcatgtatgaaaatttttactccacacaggtgtttcagtagagtggggcaggaaaagagatctcttcgatttctttcaggcctgaggcttttgtgaaatgcgtcagccccctgtgacagtaggttttgatgctagtgatcttcagatctttctctctggaaatgtgcagagagtgtcagtttcccaagttctgaggtaactcctcgcccagatgtggaatgggagcctaccagctggcatacaagggaatgggtaggaggacctgggtgctgactcttttcgcactggcccctttccatactgctgatacattcccatggctctgaaaaagccttatcctcaacctatttggaaaaacccgccaggcacaacaaggaatgaccccaaaggactactccttttatccttggtatattggattacctcaaaggggataattcacctcactgcttgacgggaaattttgcccgaattttggaaatggaataaaaggccaaacaaaatttttttaaccccctccattttgcccctttggggaaattttaccgaagaccaccccgtgaggccgaaattaacacacataatttttttcagggaggggcgcggacccctttaaagaaaacttcaaaatagacttcgggaacattgtgggggacaaaagaaaaaatgaacccggacctcggaaagccacacccccacattaagtgcggctgcgtgaaattttagacactcgaacaagactttcccttttataaac

SEQ ID NO: 7621 - DNA, 1089 bp, Homo sapiens
  misc_feature (778)..(778): n is a, c, g, or t
  misc_feature (802)..(802): n is a, c, g, or t
  misc_feature (809)..(809): n is a, c, g, or t
  misc_feature (880)..(880): n is a, c, g, or t
  misc_feature (891)..(891): n is a, c, g, or t
  misc_feature (904)..(904): n is a, c, g, or t
gacccacgcgtccgcggacgcgtgtgtcgacccgggcgagggacaagacgtccggacccacgcgtccgcccacgcggctctcggcttccactgcagccatgtcactcctcttgctggtggtctcagcccttcacatcctcattcttatactgcttttcgtggccactttggacaagtcctggtggactctccctgggaaagagtccctgaatctctggtacgactgcacgtggaacaacgacaccaaaacatgggcctgcagtaatgtcagcgagaatggctggctgaaggcggtgcaggtcctcatggtgctctccctcattctctgctgtctctccttcatcctgttcatgttccagctctacaccatgcgacgaggaggtctcttctatgccaccggcctctgccagctttgcaccagcgtggcggtgtttactggcgccttgatctatgccattcacgccgaggagatcctggagaagcacccgcgagggggcagcttcggatactgcttcgccctggcctgggtggccttccccctcgccctggtcagcggcatcatctacatccacctacggaagcgggagtgagcgccccgcctcgctcggctgcccccgccccttcccggcccccctcgccgcgcgtcctccaaaaaataaaaccttaaccgcggaaaaaaaaaaaaaaaaaaaaaaaaaaaaaaaaccacccaaaaaaccaacaaaacccccacccaaaaaaacccaaacaccaccaccccacccccccccccccccanccaaacacaccacaaccccccaanccccacnaccacccccccccccccccaaacccccccaaacccccccccccccccaaaaaaacaacccccccccccccnaactaaccccnccacacccccaanggccggcggcccccccaaaaaaacaccccggggggggggcccaaaacgatgattgacccccccccttttctctttccgaacagttcgggcgctatttaaagagtggcgctcatatttaaaaatattcgtggccgcgggcgtattaatattctatacacccttacgccgtaggcgacaacattcta

SEQ ID NO: 7622 - DNA, 2673 bp, Homo sapiens
  misc_feature (1405)..(1445): n is a, c, g, or t
ccagacggaagcgcgctgggactgacacgtggacttgggcggtgctgcccgggtgggtcagcctgggctgggaggcagccccgggacacagctgtgcccacgccgtctgagcaccccaagcccgatgcagccacccccagacgaggcccgcagggacatggccggggacacccagtggtccaggtggaaccaccctgtgtatgcatgaccctgacaagcaggcgccaggacagtcaggaggccaggcccgagtgccaggcatggacggggacgctgctgctgggcacgtgccttctgtactgcgcccgctccagcatgcccatctgcaccgtctccatgagccaggacttcggctggaacaagaaggaggccggcatcgtgctcagcagcttcttctggggctactgcctgacacaggttgtgggcggccacctcggggatcggattgggggtgagaaggtcatcctgctgtcagcctctgcctggggctccatcacggccgtcaccccactgctcgcccacctgagcagtgcccacctggccttcatgaccttctcacgcatcctcatgggcttgctccaaggggtttacttccctgccctgaccagcctgctgtcgcagaaggtgcgggagagtgagcgagccttcacctacagcatcgtgggcgccggctcccagtttgggacgctgctgaccggggcggtgggctccctgctcctggaatggtacggctggcagagcatcttctatttctccggcggcctcaccttgctttgggtgtggtacgtgtacaggtacctgctgagtgaaaaagatctcatcctggccttgggtgtcctggcccaaagccggccggtgtccaggcacagcagagtcccctggagacggctcttccggaagcctgctgtctgggcagccgtcgtctcccagctctctgcagcctgctccttcttcatcctcctctcctggctgcccaccttcttcgaggagaccttccccgacgccaagggctggatcttcaacgtggttccttggttggtggcgattccggccagtctattcagcgggtttctctctgatcatctcatcaatcagggttacagagccatcacggtgcggaagctcatgcagggcatgggccttggcctctccagcgtctttgctctgtgcctgggccacacctccagcttctgtgagtctgtggtctttgcatcagcctccatcggcctccagaccttcaaccacagtggcatttctgttaacatccaggacttggccccgtcctgcgccggctttctgtttggtgtggccaacacagccggggccttggcaggtgtcgtgggtgtgtgtctaggcggctacttgatgtagaccacgggctcctggacttgcctgttcaaccttnnnnnnnnnnnnnnnnnnnnnnnnnnnnnnnnnnnnnnnnntgtttggacaggctcagagggtggacctgagctctacccatgaggacctctagctcccaaccccacagcctctccaaggacccaggcgccagcagccccgggacacaggggactcagtgtgtgggacttggtcactccatgtcagacacacgagcagagaggaacacaaaccactgtggagcctgaagctccttaagaagagtccacaacagctggtgggagggtggggtgggcctgggtccagaccaggctcgctgctctctgggcctcagtttccccacctgccagcgggctcggccctgtcctcctcacaggctggtgtggccgtcagggtgggtggggttattgttagtaggcgcagcctcattcccaccacgatctgttccgcgtggttcccgccaaacctccctcggtcgccgtgttctccgcaagcctcctgcagcgcctgcctgccaatgtgaggctggcaccaggctgcagcctccccaatcccagcccactttgctgtgtctctggcgggctgtcctccttggtgggagctgtcctgcacactgtaggatgcttaaaggtatccctggcctccacccacccctagccagcagctcccagtcagacaacagccagaaatgtctccagactctgcccagcctccccaggtagccaccctcgagacacgacctcagagtctctgtgtctcctagaagcctgacagagacccccagggcagtgggtgggtggcgggctagagacccttgcctgtgtccgggaccctggcgccgctctcccctcctgtggatccctccgcactaacagtgttctcagtgggcagacgcctgggcaccccttgggccctgcccagcatggccatggcgcaggctctcgaacccgcatggctttcccaggcctggtgattctgctctccagggacggttggcaccttcctcgggggcgggccccacgcaccccagaacacacagacccacctttctggcgttctttctacctcccttttcgttgcctgaggagctggtggtttcatgagttaatgatacatcttgcaaggtgtacacatagagaaaaaaacctaaaaatgtggaaaagcacgccaaagccttatttaaataataactattaaactattcaaaaagaaaaaaaaaaaaaaaaaaaaaaaaaaaaaaaaaaaaaaaaaaaaaaaaaaaaaaaaaaaaaaaaaaaaaaaaaaaaaaaa

SEQ ID NO: 7623 - DNA, 3075 bp, Homo sapiens
aaaactaaatgaagggaagcatacaaaaggctgaaagcaagactgctttaaaaccggaggaaaattgaggaactgctaaggcaacctggcctgagttcagctgtgcaacaggcactttgggttttaatcttttgcgttcttcaatgctgttttcagactccagatatactttggtattgttttctctcttcctgcaaagctgaggcagagtcggactcctttactgtgagttgaaagatgtgagaataaggcattgctggaagcaacagtttggcagcctggggtacactcaggttattcgttacaactattattatttgatgtcttttttttaaactcaggtcatccacttttgactgtcatccatggaagagctcttattaaaagcctcagactttcgggacctatgattctttggcacaaccttttggaaaattcttaagcagggatgaagcaaacttgattggagttggggaaaaagaagacagattagtatttttcatgctgacaaaaaatagctgctatgacttttcccgcaacgtgacaggggccaagtgaagctgaactggtcatggtctgtcgcccagtgttggcttgtcgtcggcgattttgcccccgacccttcttggtgggcttagtggtggcaatctgtctcttctaccagactctgaccctccgagggtcgaggaagctcacagccgctgcccctggggctgtcccacacacatccactgaaacccaggcaagcagatgcaagaaaggattctctcaggacaaacagtgcttccttctctctggtaatgcccaggaaaccagaaaggtcaaagaatcaatggagacacactttggcagccatggccgaagggccatactctacaggcctcctttctacagcaaaacagagcttcagctacaccagcacattctgactcaacatggctatacggttgtcatcgctgaagaaaggctcaatgctggcctagggccggggctactagaacaaggtgatctgggctcttgggatctgctcatttgcctgtcttctaagaaagcagaaggaacaccctgtatatccaaggaagtcatgtgccagttaggtttacatcaaaaggcaaacagattaccagaaatacagcagccactttgcagaaaggaaggattatgtcaaatagttagaagattcccagaactgcaacttccagtgagtccctctgtgtgtctggatcagggaatgcaattaaagccgagtacttcgagtcaccttttaaaaacagtgaagccacgtgtgtggaaaccaggggactggagtcgtgaacagctgaatgaaacgacagtccttgctccacatgaaacaatctttcgagccgaagatctatctgtgattcttaaagcgtatgtgttggtgacgtccttaacccctttgcgtgcattcattcattcgactggcacagtttggaatccaccaaagaaaaaacgcttcactgtcaagctgcaaacattttttgagacattcctgagagccagttcacctcaacaggcttttgacattatgaaggaagcaattggcaaactactgctagccgctgaagtattcagtgaaacatctactctgggaccaaagaccttccatagatgcagattctgctttcaacttctaacttttgatattggttatggcagtttcatgtaccctgtagtgctccaggtacacgagcatttaaattttcaagattatgataatatggattttgaggaccaaaatacagaagaattccttttaaatgacactttcaattttctcttccctaatgaatcatcactttccatattttctgagatatttcagagactttatagatcagatgttttcaagggtgaaaactatcaaaaggaactaaatcagtgtctgtccttagaagaaattaactcaattatgactttcataaaggaacttggaagtctgggacaattccaactgctcttcccatctactactcctgggattcagtcactgatgcatgaattttatgatgtggcaaatcctgtgggaaatcctggctcagtcctgacccaatactggtctcttttaaatgtatttgaacaatttcagttcatgaataaaaagacacagccacatccactggaatggaattctttcacagaagataagaacattgaaaaaccacaagtgccatttgatgcaatagaaaataaaaaagctggagttccacaaattaaaaatgaaaataaagaaatacattgcagtgatgatgaaaacacaccatgtcatatcaagcagatcttcacacatccacatttggaactaaatcctgactttcatccaaagatcaaagattattactgtgaagtcccatttgatgtggtaacagtgacaattggagtggaaactcctaagtgtctgtgcaaggtgcacctgtacgagcaggcagggccaagctttgccagctaccctctgggcttaggaatgaacaaaatctcaatatttgttgtggatgaatctccagcacacggtgagactctgatcacgtacaaactcaccatctatagagaagaccgcccaagtctgcccttgtttgaggccttcacagcatgtggttttgtgcaggattgtggtttgctgattcatccagaggaaacctgtgggttacagcctatttcttctgactacattgaagccattttacagtctgaactaaaaagatgtccatctggggacatgaaaggccagtggattgtgccttgccttagttgttcggacaacaggacgtgtgactggagagaaataacctggcagccccacaactgccaatatggtgtcctaactaagcctcaactccagcagtgcctgggaggaaggaagttgggtgtcgatgtccagagagttcctagaagccgtaattgaagacacaatccagtcatcctgggaccctaaatgacctccctgccccacccctgcacataaacctgacttgaatcacctggactatttttctgagagagtaataaactttaattgggtttgaccaaaaaaaaaaaaaaaaaaaaaaaaaaaaa

SEQ ID NO: 7624 - DNA, 3105 bp, Homo sapiens
gggaggcggggcgcagggatccggaaacacctgatcatctataggtttagtgcctaatgggtgttgttcctggctggacttgatgtccagggcctgaggggttttctcgccgagtctcctggggcggtccggaggctcgtgccctgttgtggggcccccatttgccgccgccatgcccacggccgccgcccccatcatcagctcggtccagaagctggttctgtatgagactagagctagatactttctagttgggagcaataatgcagaaacgaaatatcgtgtcttgaagattgatagaacagaaccaaaagatttggtcataattgatgacaggcatgtctatactcaacaagaagtaagggaacttcttggccgcttggatcttggaaatagaacaaagatgggacagaaaggatcctcgggcttatttcgagcggtttcagcttttggtgttgtgggttttgtcaggttcttagaaggctattatattgtgttaataactaaaaggaggaagatggcggatattggaggtcatgcaatctataaggtcgaagatacaaatatgatctatatacccaatgattctgtacgggttactcatcctgatgaagctaggtatctacgaatatttcaaaatgtggacctatctagcaatttttactttagttacagctatgatttgtcccactcacttcaatataatctcactgtcttgcgaatgcccctggagatgttaaagtcagaaatgacccagaatcgccaagagagctttgacatctttgaagatgaaggattaattacacaaggtggaagcggggtatttgggatctgtagtgagccttatatgaaatatgtatggaatggtgaacttctggatataattaaaagtactgtgcatcgtgactggcttttgtatattattcatgggttctgtgggcagtcaaagctgttgatctatggacgaccagtgtatgtcactctaatagctagaagatccagtaaatttgctggcacccgttttcttaaaagaggtgcaaactgtgagggtgatgttgcaaatgaagtggagactgaacaaatactctgcgatgcttctgtgatgtctttcactgcaggaagttattcttcatatgtacaagttagaggatctgtgcccttatactggtctcaggacatttcaactatgatgcctaaaccacctattacattggatcaggcagatccatttgcacatgtggctgcccttcactttgaccagatgttccagaggtttggctctcccatcatcatcttgaatttagtgaaggaacgagagaaaagaaagcatgaaagaattctgagtgaagaacttgttgctgctgtgacctatctcaaccaatttttgcctcctgagcacactattgtttatattccctgggacatggccaagtataccaaaagcaagctgtgtaatgttcttgatcgactaaatgtgattgcagaaagtgtggtgaagaaaacaggtttctttgtaaaccgccctgattcttactgtagcattttgcggccagatgaaaagtggaatgaactaggaggatgtgtgattcccactggtcgcctgcagactggcatccttcgaaccaactgtgtggactgtttagatcgcaccaacacagcacagtttatggtgggaaaatgtgctctggcctatcagctgtattcactgggactgattgacaaacctaatctacagtttgatacagatgcagttaggttatttgaggaactctatgaagatcatggtgataccctatcccttcagtatggtggttctcaacttgttcatcgtgtgaaaacctacagaaagatagcaccatggacccagcactccaaagacatcatgcaaaccctgtctagatattacagcaatgctttttcagatgccgatagacaagattccattaatctcttcctgggagttttccatcccactgaagggaaacctcatctctgggagctcccaacagatttttatttgcatcacaaaaataccatgagacttttgccaacaagaagaagttatacttactggtggacaccagaggtgataaagcatttaccattgccctatgatgaagttatctgtgctgtgaacttaaagaagttgatagtgaagaaattccacaaatatgaagaagagattgatatccacaatgagttctttcggccatatgagttgagcagctttgatgataccttttgcttggctatgacaagctcagcacgtgactttatgcctaagaccgttggaattgatccaagtccatttactgtgcgtaaaccagatgaaactggaaaatcagtattgggaaacaaaagcaatagagaagaagctgtattacagcggaaaacggcagccagcgccccgccgccccccagcgaggaggctgtgtccagcagctctgaggatgactctgggactgatcgggaagaagagggctctgtgtctcagcgctccactcccgtgaagatgactgatgcaggagacagtgccaaagtgaccgagaatgtggtccaacccatgaaggagctatatggaattaacctctcagatggcctctcagaagaagatttctccatttattcaagatttgttcagctggggcagagtcaacataaacaagacaagaatagccagcagccctgttctaggtgctcagatggagttataaaactaacacccatctcagctttctcgcaagataacatctatgaagttcagcccccaagagtagacagaaaatctacagagatcttccaagcccacatccaggccagccaaggtatcatgcagcccctaggaaaagaggactcctccatgtaccgagagtacatcaggaaccgctacctgtgaaaagagcgcaggtccacctggtggacacgtctgattagcttagaacctgtcttgtctcatcttcaaaaggtaacttattaaaagtcctttgcgtctgaagcctttctccttttctgtcatttgcaaattccaaattatagctaataaagatgactagataactaaaaaaaaaaaaaaaaaaaaaaaaaaaaaaaaaaaaaaaaaaaaaa

SEQ ID NO: 7625 - DNA, 3622 bp, Homo sapiens
  misc_feature (181)..(181): n is a, c, g, or t
  misc_feature (2230)..(2230): n is a, c, g, or t
gcccgcacccacctcccggccccaggcacactgcatcggcgcggacgctccggccccggcgaggtggctgcaaactcgcgggcacgcacggcgcccggggagccgagggactcgggggaggggacgcgcgcggaaggcgccagcttcctcccgcccgcccctggcagccgcgagccgaggntggaggcgcccggggccccagccgggcagagccgagcggcggcggcggcggcggcttcccttttctccccgagccgagccccggagcggcgcggggaccggccctaaaaagagcaggaaatcttgtttaccgcccgcggagagaagccgatcgagcctttgtctggaaagtcagcatctccggctccggctgcaatgtgttcctggtgacattagcatcgggcagacccgccggaggagggggggtcgccaggttcccgtctgctttcggaggcggatcgagcgggtgacttttgtgcattcgttttaatttttggaaatctctcttttttcctccctcgctcgctgccgggcatgtcctgatctggcggccgctcctaccaccctgggcagccgagcagagtcgtccccagcgggtctccctccctgcctccctgactttgcaacaccgcgttccgggaggaccggcctcggcgagggaggaggcgggggagctgcgaacacccagacccaaaccctgacatgctctggggcggagaggaggaagccaggagctgagcgcgccgcgggggctgcttcgccctccggctccgagcgccgggctccgggcgccctgccctgcgcctgggcagcagccttgctggtcttgggggcgccccccgcttcccgccccgggggtccgcggccggcaggaccatgctgctgaaagagtaccggatctgcatgccgctcaccgtagacgagtacaaaattggacagctgtacatgatcagcaaacacagccatgaacagagtgaccggggagaaggggtggaggtcgtccagaatgagccctttgaggaccctcaccatggcaatgggcagttcaccgagaagcgggtgtatctcaacagcaaactgcctagttgggctagagctgttgtccccaaaatattttatgtgacagagaaggcttggaactattatccctacacaattacagaatacacatgttcctttctgccgaaattctccattcatatagaaaccaagtatgaggacaacaaaggaagcaatgacaccattttcgacagtgaagccaaagacgtggagagagaagtttgctttattgatattgcctgcgatgaaattccagagcgctactacaaagaatccgaggatcctaagcacttcaagtcagagaagacaggacggggacagttgagggaaggctggagagatagtcatcagcctatcatgtgctcctacaagctggtgactgtgaagtctgaggtctgggggcttcagaccagagtggaacaatttgtacacaaggtggtccgagacattctgctgattggacatagacaggcttttgcatgggttgatgagtggtatgacatgacaatggatgaagtccgagaatttgaacgagccactcaggaagccaccaacaagaaaatcggcattttcccacctgcaatttctatctccagcatccccctgctgccttcttccgtccgcagtgcgccttctagtgctccatccacccctctctccacagacgcacccgaatttctgtccgttcccaaagatcggccccggaaaaagtctgccccagaaactctcacacttccagaccctgagaaaaaagccaccctgaatttacccggcatgcactcttcagataagccatgtcggcccaaatctgagtaactttatataaatatctcatggggttttatattttcatttgttgttgttgtttttttttaagaatcttctgatagagaaaaagactgctttgtcactcaaacatgttccttcgacctttcagtgtgcatgtgactcagtaacttcacatagaatatgattccctaagtatgctacacagcatcatattagatgtaagatgtaagacttgccaaaggacagaaggaatccttctgtaaccacatagctgtatgcccagagaggaagccttgttaattgggcatttgatgaggtttggcatggacttcaaggataaatgaatgaaaactttgcaccacttttgttacaaggtacggtngaaaatagtgaagtcagtttcctctcatcaaatcgtaaaattctccaaaatactctcaggcataacatacttagctgttaaattttgaactgctaattactaatacttgaataccaatagttactgagattcctattttgtggttagtctgactcaggatttggagcctaattaactctaaacttttgaaaattttaatcatcaagctatagaggctccaagtgcaattaataataactcatttataccttccacagaatttaataaagattctacttgtttctgtcttttaataactttccccttttgtgcccttgtggcctcagaaatccttaagaattgcatggatgaatgtgaccataactgattttggaatggttcagtttaggaaccaagaggcccaggtgaggcaacatcttttttctctacaggtaccaacaaaccttgacttgtcagcttccatcatcaattaagattctcagaatttgcaattaattgaatagaattcatttactatctgcccactcaaagaagtacaagggtagagtaagctaactgggctttaacatggtcagaatgtctggtgcatgaactataaaaaagaggactgtcttccatccccttccttgttttactcttagtaacatccagaattccctggaacagattgcctaccacccagaccttagaaaaagactggcattctcttgctccttacttgaaatacaaatattgggaatgtcacagacatcaagcaactactgtcaagtgggaggagagaatgagcagaattgctgactcctatttgtagagtgaaaaggaggagtgataatagatgcccttctgtctagctttcctttcttcaactagtggtaatgcaagattagaatcaaggttgacaggaggcaaggtcactcactgaagtgacagaaagacaattctcctttgctccaaagagagaaatctgtcacctttgcacctcactgcctttaaacacagacgggagggcaggccaaatctcagcattgacttttgtcctccaagagaggaagagaagaagtaattgggcaacttggaggcccacgccccagctagccttcctgatcgtaacctccaacctcaggaaagggaccttcccaaaacacagatcccaaaggaaacaaaatagaccaaggagcataatctgcttctctcacacagcctctctgccagtggaccctgcctgcttccctctcagtgctcagcactctgtgtagtgtctttcaggttgatacactctcccaaggtgcaggcgctggccccatgagcccagcaccaaagttttctaagtcataggtcagactgtcaagatcatttctttatctataggttgatatttagcttaaaaaaaaa

SEQ ID NO: 7626 - DNA, 775 bp, Homo sapiens
  misc_feature (12)..(13): n is a, c, g, or t
ttcgacccacgnncgtccggggcacttcccccagtccccgagggggatccggtgttgcatccttggagagagctgagagctcgagggacggggatttcgctatgttgcccaggctggtctggaactccggagctcaagcagtccgcccgccttggccccccaaagcgctggaattacaggcgtaatgcactgtgcctggccttttaaaaaaaaattgaggttattttggggacagtagagcgtccagacacatcctaatttgcgtagctgctcagttttaaaaaatgcaatgcatttttacctgttagggtatgtgatttctggctggtaagctacaccgaatcttggctagcacagttgaattccatgtcagatttgtaaacgcaaatttgctctctgcatttaaatatattagatatatttaggtaactacatttaaatgtattgagacatttaaataaatttgccgtctgtatctaaatatctgaagtggaccaggtgcggtggctcacgcctgtgatcccatcgctttgggaggccaaggcaagtggatcatgaggtcaggagttcacgaccagcctggccaacatggtgaaatcccatttctactaaaaatgcaaaaattagctgggcgtggtggcgggcgcctgtggtcctagctacttgggaggctgaggcgggagaatcgctggaacccaggagacggaggttgcagtgagctgagattgcaccactgcagtctagcctgggtgacacagcaagactccatctcaaa

SEQ ID NO: 7627 - DNA, 3928 bp, Homo sapiens
attcgtataaaggcgggggcgggggcggggcacgagggtgggtccctgccggccggcggcgggcgcagacagcggcgggcgcaggacgtgcactatggctcggggctcgctgcgccggttgctgcggctcctcgtgctggggctctggctggcgttgctgcgctccgtggccggggagcaagcgccaggcaccgccccctgctcccgcggcagctcctggagcgcggacctggacaagtgcatggactgcgcgtcttgcagggcgcgaccgcacagcgacttctgcctgggctgcgctgcagcacctcctgcccccttccggctgctttggcccatccttgggggcgctctgagcctgaccttcgtgctggggctgctttctggctttttggtctggagacgatgccgcaggagagagaagttcaccacccccatagaggagaccggcggagagggctgcccagctgtggcgctgatccagtgacaatgtgccccctgccagccggggctcgcccactcatcattcattcatccattctagagccagtctctgcctcccagacgcggcgggagccaagctcctccaaccacaaggggggtggggggcggtgaatcacctctgaggcctgggcccagggttcaggggaaccttccaaggtgtctggttgccctgcctctggctccagaacagaaagggagcctcacgctggctcacacaaaacagctgacactgactaaggaactgcagcatttgcacaggggaggggggtgccctccttcctagaggccctgggggccaggctgacttggggggcagacttgacactaggccccactcactcagatgtcctgaaattccaccacgggggtcaccctggggggttagggacctatttttaacactagggggctggcccactaggagggctggccctaagatacagacccccccaactccccaaagcggggaggagatatttattttggggagagtttggaggggagggagaatttattaataaaagaatctttaactttaaaaaaaaaaaaaaaaaaaaaaaaaaaaaagggcggccgcaacgtctgcaagttcgcgctgcacagcggctacagcagctacagcctcagccgcgcgccggacggcgccgccctggccaccgcgcgcgcctcgccccggcaggaaaaggatgcgcctccacttagcaaggctgggcaggatgtggttctgcatctgcccacagacggggtggttctagacggccgcgagagcacagatgaccacgccatcgtccagtatgagtgggcactgctgcagggggacccgtcagtggacatgaaggtgcctcaatcaggaaccctgaagctgtcccacctacaggagggaacctacaccttccagctgaccgtgacggacactgccgggcagagaagctctgacaacgtgtcagtgacagtgcttcgcgcagcctactccacaggaggatgtttgcacacttgctcacgctaccacttcttctgtgacgatggctgctgcattgacatcacgctcgcctgcgatggagtgcagcagtgtcctgatgggtctgatgaagacttctgccagaatctgggcctggaccgcaagatggtaacccacacggcagctagtcctgccctgccaagaaccacagggccgagtgaagatgcagggggtgactccttggtggaaaagtctcagaaagccactgccccaaacaagccacctgcattatcaaacacagagaagaggaatcattccgccttttggggaccagagagtcaaatcattcctgtgatgccagatagtagttcctcagggaagaacagaaaagaggaaagttatatatttgagtcaaagggtgatggaggaggaggggaacacccagccccagaaacaggtgcagtgctacccctggcgctgggtttggctatcactgctctgctgcttctcatggttgcatgccgactacgactggtgaaacagaaactgaaaaaagctcgtcccattacatctgaggaatcggactacctcataaatgggatgtatctatagtaatgtaatttcaataccttggggcagggacatgttttgtttataatttatacatctattaagttctggatatttacagcttcttttgtttttaattgggccagaagattctgcaaatcccaaatctttctttattatttattgtaaaaaaagtttccttagaagtcataaaatattttgaaatttagagaggaattcatgattaaagattcctaaaaatataattctgatttatgtaagctgtccctgaaaatagaaatgtgtacttagctgagagaaaattcagcatctcaggaggtggtattaggatgactgtgttaacccattaccttttagaagccaactgttggccccttaccatgctggactgctataggcccagcttccccttgttctgtggcccttttcttcctccttgaagctcccagtattctttttcttttcccctctaaacctgtttctgagagtggatctcaagcaagttcatgccttcaatcagatgttacttagggtgggtatacctaaattataaaccttatgtacaagtcagtaagccttagggaaggtgagtgtgggtccttcctaatccctctgacgtcatgtcatataggtggctgcctccttagactgacctttgggagaaaaaaaccccagactttgaattagtaacagctctaagatggtcatgcagtgagataggaaatcaagatggaagcagagaatctggcatgccaaaaactaacagaaacttagttgaaggcaaagagagcaaggagaacgtttaatacttcattacatcaaatcaacactgctccatggtgggagcacagcaactcatttatatatatatatataggctttgttgatgaaaaacgacaattgaagagaggacgttgagtggattcctgggtacagcttttgtaaaaatgtcaccatggctttcatccaatggaatgagtcgatgttttttaatgctataaaatgttagaatgtgccatcagctaatgccaggcttacgtatttctagaccataaagcagtttttcacaaattcatctttacagaaaaccagcatctagcttagcatctttccccttttaatttgtaggcttttaaaggcaaatcattcccaccatcacttaacgccgggattatacacattctagaaatgattctgagaggagtgtatagtatggtgcctatctacactcacatgatattcttattcacgttttttttaaccataagtggcaaatattttaaaatatttgaaaaacactccagaatctagtacgctttatttttagactgaacctaaagtaggttgttcttttaacaaagggtttaattcgggtggggaatataacatatcaaaatacatgaacaaatggaaagttacttctagaaaagcaaagaaattgggtatcatttttgtttcttgggaagctaattttgttgaatgtttagaattgagcaaagatgtaaatttttgaagggcagtttagaaaaattaactttgtgaatgaacttaagatgtctgtactctatatgtgatgctgtgcagtttgtttttatatggaaagatgtcaactatagccataaccaataaaataaaaactgatgaggcatgcagctttcagcacatcttttatacatgaagaaattaattttgtgttgctatggtgttgaaatatccaagatgttctgtatctatgtaaacatgattcctttaataaattgtattttattattaaaaaaaaaaaaaaaaaaaaaggcgaaaattaacatttggcggcaaaagaaagaattagaaggggagggtgttcccaaagggggggggaaagaggttggtaagaag

SEQ ID NO: 7628 - DNA, 596 bp, Homo sapiens
gcaagaggtgtttttttttttttttttttttatccaaaagaaagctatgtctggttaggtaaatcatacacctgtatccagagttttgttttgtttttttttttaggtttttctttttaatgaaggtcttacaactattttccttttattaccactacgtacttctaaatattaatgtttttacaaaagcactgtaatggttttttttgtttttaaagaaataaattttcagttacttcttttggatgtcccagatacactaatcgtttgcaagtaacaataatatggcattctcatttccagccttcacatctcaggagagtattaaagggtggtattggagcacaccctcaggacatgtttgttttcaaatttagattctctgtggccattccagcctctatagagatctgaaaaaaacatttagtgccaccctctcattttatagttcaggacacaagcccagaaaggccacacaaggactatgtgtgtcgtaactgagagtaggctctgggtctcttgacccactgaacagtgctctttcactgtgagatgccagtactagggaagctcaccttcagatctctgctaggtca

SEQ ID NO: 7629 - DNA, 2489 bp, Homo sapiens
atggaggactctgaagcactgggctgctcccgctcgcgtcggtggcgtttttcctgcagcgcgtgcgtgctgcgctactgagcagcgccatggaggactctgaagcactgggcttcgaacacatgggcctcgatccccggctccttcaggctgtcaccgatctgggctggtcgcgacctacgctgatccaggagaaggccatcccactggccctagaagggaaggacctcctggctcgggcccgcacgggctccgggaagacggccgcttatgctattccgatgctgcagctgttgctccataggaaggcgacaggtccggtggtagaacaggcagtgagaggccttgttcttgttcctaccaaggagctggcacggcaagcacagtccatgattcagcagctggctacctactgtgctcgggatgtccgagtggccaatgtctcagctgctgaagactcagtctctcagagagctgtgctgatggagaagccagatgtggtagtagggaccccatctcgcatattaagccacttgcagcaagacagcctgaaacttcgtgactccctggagcttttggtggtggacgaagctgaccttcttttttcctttggctttgaagaagagctcaagagtctcctctgtcacttgccccggatttaccaggcttttctcatgtcagctacttttaacgaggacgtacaagcactcaaggagctgatattacataacccgttaccctttaagttacaggagtcccagctgcctgggccagaccagttacagcagtttcaggtggtctgtgagactgaggaagacaaattcctcctgctgtatgccctgctcaagctgtcattgattcggggcaagtctctgctctttgtcaacactctagaacggagttaccggctacgcctgttcttggaacagttcagcatccccacctgtgtgctcaatggagagcttccactgcgctccaggtgccacatcatctcacagttcaaccaaggcttctacgactgtgtcatagcaactgatgctgaagtcctgggggccccagtcaagggcaagcgtcggggccgagggcccaaaggggacaaggcctctgatccggaagcaggtgtggcccggggcatagacttccaccatgtgtctgctgtgctcaactttgatcttcccccaacccctgaggcctacatccatcgagctggcaggacagcacgcgctaacaacccaggcatagtcttaacctttgtgcttcccacggagcagttccacttaggcaagattgaggagcttctcagtggagagaacaggggccccattctgctcccctaccagttccggatggaggagatcgagggcttccgctatcgctgcagggatgccatgcgctcagtgactaagcaggccattcgggaggcaagattgaaggagatcaaggaagagcttctgcattctgagaagcttaagacatactttgaagacaaccctagggacctccagctgctgcggcatgacctacctttgcaccccgcagtggtgaagccccacctgggccatgttcctgactacctggttcctcctgctctccgtggcctggtacgccctcacaagaagcggaagaagctgtcttcctcttgtaggaaggccaagagagcaaagtcccagaacccactgcgcagcttcaagcacaaaggaaagaaattcagacccacagccaagccctcctgaggttgttgggcctctctggagctgagcacattgtggagcacaggcttacacccttcgtggacaggcgaggctctggtgcttactgcacagcctgaacagacagttctggggccggcagtgctgggccctttagctccttggcacttccaagctggcatcttgccccttgacaacagaataaaaattttagctgccccaaaaaaaaaaaaaaaaaaatgaaaaggactatttgaatccccaaaacatcaggagtcgggaaacttcggaagacagctgtgcctggctctgtggctgcatgcagtgcttcacttggccagcagaggtcagctgtgccgagctgccccagccatgagaagagaagcctgcccttgctggcaggtggctatggccggcccagagccttcctgcccagctcctgcagccctgctgcctgggatcaggctgggagatgggccttcctgaccgccagccttcctctccccgagcacacgcacatgtagattcggggggaagctgcctgctcttccttagaggagccggggcagctatctgctggtccctttctgaacaactgttgatgtgtgaaaaaaaaaaaaaaaaaaaaagcataagcggtggtgtgacatacacacatgtgtactgtcccttatgccctggcctggctctccagctgccttctcagcctgaaggctggcttctctgctggcttggggtcctagattgcatgtcacctgcttaccaggcgtcacaaggcca

SEQ ID NO: 7630 - DNA, 6229 bp, Homo sapiens; identical to SEQ ID NO: 4964
  misc_feature (1185)..(1205): n is a, c, g, or t
  misc_feature (3670)..(3690): n is a, c, g, or t
  misc_feature (3698)..(3749): n is a, c, g, or t
  misc_feature (4563)..(4576): n is a, c, g, or t
  misc_feature (5590)..(5607): n is a, c, g, or t

SEQ ID NO: 7631 - DNA, 7277 bp, Homo sapiens
  misc_feature (1499)..(1534): n is a, c, g, or t
gcactccggccgggctctgctggctgcggcgggagctggacgcgggaggaggcggcggcggcgctggaacagtgaaccatggagctgtatttcggtgaatatcaacatgtgcagcaggaatatggggtccatctgagactcgcaagtgatgatacccaaaaatcaaggagttcccagaactccaaggcaggctcctacggtgtcagtattcgggtccagggaattgatggtcacccctatattgtcctgaataacacagaacggtgcctagcaggcacatcgttttctgaaaatgggccaccctttccacctccagtgataaataacctgcctctacattccagcaatggttctgtgccaaaggagaacagtgaagaacttcagcttccagaaaacccatacgcccagcctagcccaataagaaacctgaaacagcccctgctccatgagggcaagaatggagttctagatcgcaaagacgggtctgtgaagccatctcacctgctgaactttcagaggcatccagagcttttgcaaccctatgaccctgaaaagaatgagttgaatttacaaaatcaccagccttctgagagtaattggctaaaaacgttgacagaagaaggcatcaacaataagaagccttggacttgctttcccaaacctagcaattcccagcctaccagtccctccttggaagacccggccaaatctggtgtgacagctattcgtttatgcagctccgtggtcatagaggaccccaaaaagcagacctcagtgtgtgtaaacgttcagagctgcaccaaggagagggtgggagaggaggcccttttcactagcgggaggcccctgactgcccacagcccacatgcccaccctgaaaccaagaaaaccaggccagatgttcttcccttccggcgacaggattcagcgggacccgtcctggatggagctcggtcccggaggtcctcctcgtcatccacaactcccacgtcagccaactctttgtacaggtttttactggatgatcaggaatgtgccatccatgccgacaacgtcaatcgtcatgaaaacagaaggtatattcccttcctgccaggaactggacgggatattgatacaggatcaattcctggtgtggatcagttaattgaaaaatttgatcaaaaacctgggcttcagagaagaggaaggtctgggaagcgaaacagaattaatccagatgacaggaaaagatccagaagcgtggatagcgcctttccttttggcctccaagggaactcggagtacctgattgaattcagtaggaacttgggcaagtcaagcgaacacctcctccggccttcccaggtgtgcccgcagcggccactgtctcaggagcgccgtgggaaacagagcgtgggccgcacctttgcaaagctgcagggagcagcgcacggggcttcatgtgcccactccaggcctccccagccgaacatagatgggaaagttctggaaaccgnnnnnnnnnnnnnnnnnnnnnnnnnnnnnnnnnnnncccttggtgcacagagtaaaaaggaggaggaggtgaaaacagccaccgctacgctgatgttacagaaccgggcagcagcaacttcgcctgattctggtgccaagaaaatttccgtgaagacatttccttcggcctcaaatactcaggccacaccggatctcttaaagggccagcaagagctcactcagcaaaccaatgaggagacagctaagcagattctctacaattacctcaaagaaggaagcactgataatgacgatgctactaaaaggaaagtcaacttggtctttgagaaaatccagaccttaaagtctcgagcagctgggagcgcccaaggaaataaccaagcttgtaattccacatctgaagtcaaagatctattggaacagaaaagcaagttgaccatagaagtggctgaacttcagagacagcttcaactggaagtcaagaatcaacagaacattaaagaagagagagagaggatgagagcaaacctagaagagctccgaagccaacacaacgaaaaggtggaggagaactccacattgcagcaacgactggaagaaagtgaaggggagctccggaagaacctggaggagctatccaggtgaagatggaacgggagcagcatcagactgagatcagggatctccaggaccagctctcagaaatgcacgatgaactggacagtgcaaagcgatcggaggacagggagaagggagctctgattgaggagctcttacaggcaaaacaggatcttcaagatctgctgattgccaaagaggggcgagaagacctcttgagaaagcgagagcgtgaactcaccgccctgaagggagccctgaaagaagaggtttccagccatgatcaggagatggacaagctgaaggagcaatatgatgctgagttgcaggccctgagggagagtgtggaagaagcaaccaagaatgtcgaggtcttggcgagcaggagcaacacttcagagcaagaccaggcggggactgaaatgcgcgtgaagcttctgcaggaggagaatgagaagctgcagggaagaagcgaagagctggagcggagagttgctcagcttcaaaggcagatcgaggacctgaaaggcgatgaagccaaggcgaaggaaacgctgaagaagtacgagggagaaatacgacagttagaggaggcccttgtgcacgtcagaaaggaagaaaaagaagctgtgtcagccagaagggccctggagaatgaactggaggctgctcagggaaatctgagtcagactacccaggagcagaagcagttgtctgagaagctcaaagaggagagtgagcagaaggagcagctaagaaggttgaagaacgagatggagaatgagcggtggcacctgggcaaaaccattgagaaactgcagaaggagatggcagacattgttgaggcctcccgtacctcaaccctggagctccagaaccagctggacgagtataaggagaaaaaccgcagggagctcgcagaaatgcaaagacagttgaaggagaaaacgctggaggcagaaaagtcccgactgacagccatgaaaatgcaggatgggatgcgtctgatggaggaagagttacgggactaccagagagctcaggatgaagcactcacaaaaaggcagcttctggagcagacgctgaaggacctggagtatgagctggaagccaagagtcacctcaaagatgaccgcagcaggctggtcaagcagatggaggacaaggtgtctcaactggagatggaactggaagaagagagaaacaactcagatttgctgactgagaggatcagtaggagcagggaacagatggagcagttgaggaatgagctacttcaggagagagctgcgagacaagacttggagtgcgacaagatttccctggagaggcagaacaaggacttaaagagccggattatccacctggaaggttcctacaggtccagcaaagaggggctggttgtgcagatggaggccaggatcgcggagctggaggaccgcctggagagtgaggagagggatcgggccaatcttcagctcagcaaccggcggctggagcggaaagtgaaggagctggtgatgcaggtggatgatgagcacctgtcattgactgatcagaaggaccagctgagcttgcgtttgaaagccatgaagcggcaggtggaggaggctgaggaggaaatcgacagactggaaagttctaaaaagaagctgcagagggagctggaggagcagatggacatgaatgagcatctgcaggggcagctcaactccatgaagaaggacttaagactgaagaagctgccgagtaaagtgctggatgacatggatgacgacgatgacctcagcacggatgggggaagcctctatgaggcgcctgtgagctacacattctccaaggacagcaccgtcgccagccagatctgagtgctctcccgggctgtggaagtacctgtcattcctgcaggagctgcagccacccaaagtgggaggcagggaggggagcatctgtctgccactgagaccaatcacagcctctttgcacagcatgccagctcctcagtgttacattcctcgccagggtctctcagtgggtcttcgacagagagcttttgcagtttaaaatgttgggatgcctgaggaccaggagccaccacccactggggtgttgtgagagatacactttggtaggctgaggcccctgttccacagccactatttgcattgctgtccctgccccctcatcactccccctgccaagacaaagggtccagaaggctaggacttacttaatagcactgtgcagggaggaaaccatgtatagcttgtacatattttaaaccagaccttctcacgaactgctgctgttgggtttggaatgtgatggaggcttggtagggtggctggtttgtaaagttcatgcatctatattgagtattctttttttttttttttgagatggagtttcattcttgttgccgaggctggagtgcaatggcgcaaccttggctcactgcaacctctgcctccctggttcaagtgattctcctgcctcatcctcccaagaagctgagattacggatgaccaccaccactcctggctaattttttgtatttagtagagacggggtttcaccatgttggtcaggctggtcttgaactcctgacctcaggtgatccacctgcctcagcctcccaaagtgctgagattacaggcatgagccaccacgcccagccattgagtattcttttttaaaatatgaagctattagattttaagtgttgaggagcagaggtgagaagagagagagagagagaaagtcaaataaagtcaaagaccagtttggaaaccaaagttggaaaagaagaattgtagtggtcatggacagctaagactgagcatagcagttcacatggtctgggtaaacaagtcactggcacaggggaaagccagaaggttgcttgtgtctgtgactgcagctatggccttgtttgcttagtttatctggaattctgttataatttctgaactgttctgagacctgttcccagtcactgattgcaatttcttttacacaggttgggtagggagagttgtaggtaaggccttaaacaaatgaggccgtttctggaaggatagggctgtgtggtcatgtcccacagcaagcttttgggatcgggggaataagagggtatgggggaaaggttcatagacttaggtgtgagaatgaggtgggaggtgtctggtaaggtcatgggggaagggagatgagagaggagataggcagatgtgggtatggggcccagtgtgagaaggaagacagagaagttcttgaaagctgggggatgtgtgggcaagaggtggattgagcaggatctcagggttatgtcgaggaagggaagaaagaaacagaagtcaggcagaggcgtgtctgtgcaaactggaggactccttccaacttcctggaacaaagcgacatcgccagcagcaggctggcagggagtggttgaggtctgggggccaggccacatggctggagaggaatttcagggagcatagcatcgggaggatgctacatatccagggactccctcctggccttcctgtgtcacttcacaatgtgacagtccccaggcatgcccacaggccaggcccagtcacagctgggcttccacaggtcagaatatgggacaggacatggtcagggagaggaccctgtgagttggtgacatatatgtggcagagatggtagtgttcagctgcttcagcagtgtccccaaccatcccaatagggtgggggcctgtgggccagaggactccatgacagtagccatggagtcccacctgtgccaggtcagagcccacccggcaggtttcagagtggtcagcccagtttaagggtgggagtctggagccagacagccaagccccttccaatctaccgggtcactgtcatcctcaccacagccaggggtgattctcacctctgcctgcttatgtggggtgtggccgattcctccctttagtcattcattcatttagcacatatttattgggcatcggtgatgtgtcaggcacagtccttggcacacagaatacagcagtgaattaaacaggcaaaaattcctcccctcctggagctcagtgtcaggaaagggggtgataaatgacaatcaaatcgacatggaggttgagcacctctgtactcagccctctgtctgtccttctgaggacgcaacaagcctggttccctagagctcactttgaccctcaatatgttcataatttccctgctgcttctcccatcgttagacatctgccagtaagcctgctgagagaagcctcagcccactcatacctagagacgctgctggggaaggtcagcacacccaagaactttgggagtgtgtgtctgttttggtttgtgagaaagtagctgcccctcattctggccagttctttccagtagccatggggctggctacaagaagcaaaactgcccatgcaaagagaacacaggtcacttttcaaaacacttgcatcattaccctaaaaataggctgttatgcgttttgacaattgcgctatcctacactctgagggagttggcaacgcatgcggtatagtggagtgggaagagttgagactgaaagttaagagaagggttttcaagtcccggctcatctcaccccagtgactttgacagtgtgctcactctcagagccatggattacctggaacaaagtgcagattagtgcccacggtcctttccaggtataacatgctatcgttctttaattttattatatatacatacttttcttctgttttttgctttaagaactaaccccgatcaagagtattttctttagctagcttaaaaagaaaacatatattttatgtaaaaacacatacatggccaaatgcaatactgaagagacaatcatcctgtatcttttatggtttttcctgcttctgagtgtcgttctacaatgcccgttgacttattccattgcgtctctgctttagggtatggtttggtcgctttggttgtcatgagaaagagacattctccttgcagctacctccatgtgagtgaattcctggataaagcaagatttcctttcaataaacgctgtcacccaatgggaaaaaaaaaaaaaaaaaaaaaaaaaaaaaaaaaaaaaaaaaaaaaaaaaaaaaaaaaaaaaaaaaaa

SEQ ID NO: 7632 - DNA, 542 bp, Homo sapiens
tttttttttttttttttggcaagaccaggtcatatttaatattcatgaggcacaagatatacaacacgcacttaatattcattaatcagtatatattcataatatactaaatatacaggagatattaaacgttcacgggtcttaattctgccacccagtggagacactcaaaagtgatctcgccaaagaaatgcaaaacctgtacctgcccaccaggctattagcatgctactgctgtggtcaccattctttcactgcatcgccctgccctgcatcggaatatagcaccttgaacacgggatcaggtttactgaattctgtgacccacgctgggagctcaataaatgtttgctaaacggaaatgaacccaattcagaccgtgtagaaaccccagattatatcttttctccaaacattcaatttctaagcagtatttttgaaaatgcgtgatggctaaattcgagttatcctttttgtatgtatgttaggcacacaaccggcgatgacatacaaggcgaggtgacaccactgcactcccagcc

SEQ ID NO: 7633 - DNA, 1041 bp, Homo sapiens
cggaagtgggccaccatatctggaaactacagtctatgctttgaagcgcaaaagggaataaacatttaaagactcccccggggacctggaggatggacttttccatggtggccggagcagcagcttacaatgaaaaatcagagactggtgctcttggagaaaactatagttggcaaattcccattaaccacaatgacttcaacaattttaaaaaataatgagcgtcagctgtgtgaagtcctccagaataagtttggctgtatctctaccctggtctctccagttcaggaaggcaacagcaaatctctgcaagtgttcatgaaataatgctgactcctaggatagagttatcagtctggaaagatgacctcaccacacatgctgttgatgctgtggtgaatgcagccaatgaagatcttctgcatgggggaggcctggccctggccctggtaaaagctggtggatttgaaatccaagaagagagcaaacagtttgttgccagatatggtaaagtgtcagctggtgagatagctgtcacgggagcagggaggcttccctgcaaacagatcatccatgctgttgggcctcggtggatggaatgggataaacagggatgtactggaaagctgcagagggccattgtaagtattctgaattatgtcatctataaaaatactcacattaagacagtagttgaactacccttgatatggttcagctctgtatccccacccaaatctcatgtcaaattgtaattcccagtgttgagggagggagctggtgggaggtgattggctcatgggggccgacgtcccccttgctgttctcgtgacagtgagtgagccctcgtgggatctgcttgttgaaaagtgtgcagcacctcccgcttcactctctctgtctctcctgctccaccatggccagacgtgcctgcttcccctttgccttctgcatgattgtcagtttcctgaggcctccccagccatgcttcctgtacagcctgcagaactgtgagtcaattaaacctctttcttcataaaa

SEQ ID NO: 7634 - DNA, 1160 bp, Homo sapiens
  misc_feature (917)..(917): n is a, c, g, or t
  misc_feature (923)..(924): n is a, c, g, or t
  misc_feature (932)..(933): n is a, c, g, or t
  misc_feature (937)..(943): n is a, c, g, or t
aaaccagcctcatgtgacaaagcgcaggacccctcactgccccaactgcttgctgttctctctttcttgggctctaaggacccaggagtctgggtgcacagcctccttctctctgagattcaagagtctgatcagcagcctcttcctcctccaggacccagaagccctgagcttatccccatggagctctgccggtccctggccctgctggggggctccctgggcctgatgttctgcctgatgcttttgagcaccgatttctggtttgaggctgtgggtcccacccactcagctcactcgggcctctggccaacagggcatggggacatcatatcaggctacatccacgtgacgcagaccttcagcattatggctgttctgtgggccctggtgtccgtgagcttcctggtcctgtcctgcttcccctcactgttccccccaggccacggcccgcttgtctcaaccaccgcagcctttgctgcagccatctccatggtggtggccatggcggtgtacaccagcgagcggtgggaccagcctccacacccccagatccagaccttcttctcctggtccttctacctgggctgggtctcagctatcctcttgctctgtacaggtgccctgagcctgggtgctcactgtggcggtccccgtcctggctatgaaaccttgtgagcagaaggcaagagcggcaagatgagttttgagcgttgtattccaaaggcctcatctggagcctcgggaaagtctggtcctacatctgcccgcccttccagcccttccccagcccctcctcttgtttcttcattcattcaacaaaatttggctggaaaaaaaaaaaaaaaaaaaaaaaaaaaaaaaaaaaaaaaaaacaaaaaaaaaacaaaaaaaaaaaaaaaaaaaaaaaacatganaaaaannaaaaaaannaaannnnnnncccagaaaaagttttttttttttttttaaaaaatatctcctatttgtttttggggggggggggcccccccccctttgtaaaaaaaccccggcccctttttcccaagaccctgggggcccccccccctttttaagttttaaaggccccctcttaacaaaaataaaaaacccccccccttaaaaccctcttttccacgttgggggttgcccaacccgcc

SEQ ID NO: 7635 - DNA, 3506 bp, Homo sapiens
  misc_feature (2013)..(2062): n is a, c, g, or t
agcgggctaacagagtaggcgatttcacttcgtcgtcacctcacaaaaggcttccaaattcactgcggcagacaccgcaaaataaaaatgttaaatacatcctagctgggaggggattgaagcctccaggctcaatcaaaggtttgcaataataggattcatttaaaaaaaaaaaaaaaaaaaaggacagatgggtttagaaaatgttgcagtgaagactggaacgagatgagctcatagcaccagcgggtcttttgtggacccgcacaatgatccctgagccagactggattaggatgcctcgcgactaggggtccagagacagaggcctccagttcccaggcacttcgggaagaggaggctgaaatgatgcatcagatttacagctgcagtgacgagaacatagaagttttcaccaccgtgattccttccaaggtatccagtccagccagaagaagagccaaaagctctcagcacctcttgaccaagaatgtggtgatcgagtcggacctgtacacgcaccagcccctggagctgctgccccaccgcggagaccgcagggaccctggcgaccgccgcaggtttgggcggctccagaccgcgcggccgcccacagcccacccggccaaagcctctgccagacccgtggggatttctgaacccaaaacatcaaatctgtgtgggaatcgagcatatggaaaatctctgataccgccagtgccccggatctcagtgaaaacttcagcctctgcctcattggaggcgacagccatgggcacagagaaggagctgttcttgatgacgaggatccagacactctcaacgaagatgactggaagaatccagcccttccccaaggagcagaagcctctctaccactgacaggcagtgcttcctgcggcgtccccggcatcctccggaaaatgtggacaaggcacaagaagaagtctgaatatgtgggagccaccaacagcgcctttgaggccgactaaaggtgaccctcttcaagtgccctgtgttggccaaggttccccggacaagaggaaaaaccttcaggattgaaactgagccacacgcacctctgctagtagctggtccaaacccattatcctccctcactcattgattaccctgggatagggcacaggaaagaaatgtccctcgaaggcaatataaaactgccccttcttagaattgctaaagccattggtctgaaagtgactttgggaggtcataaagtttgtatctctatctttaagcaaaaaattaaactttcccagctcattttaaagacctccaaggaaggaaaaaagcaattcctctgtcttccttgtgagttgctctaaagtgtgtgattttctagtaaactggaactttgtagcgcacttgtaaacacaatggttcttactgtttccattactgcatttacttcaccttgacaaggtacaattttcaaggacaaagcactatatataaagttagtagttctaatatccacttgagagtatactcaagattgattttcatggccatttggcatgattgcatgaattctctattcttttatgtgcagtttttctatagaaaaacattaaaagttaaatgttgactgctaatgttttctgaagtggcatagtctagtggaatcaataatcccttgctttggtataataatttgaacttttgaaagtgctttctcatccgttatctcttatcttcacaaaacccctgtggaagaaagcacaattattcccaatctgcagagggggaaatggaggccttcagagattacaggaccagataccaggtagtggaaccagacagcaggtccttaacttctctccagtggactccctgctttgcctactctctagcaactgacttggggaagtttttaaatggtgagagtgtgtctctgggggcaaccattgaaaagaagactctgatatgttggaacaagtaagggatttgaatgaaatacactattatatcttatacgttagcttgaaccannnnnnnnnnnnnnnnnnnnnnnnnnnnnnnnnnnnnnnnnnnnnnnnnnatggttcaacctcatatatgatactatgcttttcttctatcagtgaaaatgtcatcatcaattccattgtcaacattagtagccttaaaacaataacataataataatgatgataatgatacttatagctatcatctattaaatgcctatgtttcaggcatgatactaggcaatttatatatatcatcctaatctttctaaaaactctattaggtggccctatccacttaatagatgccaattcaaagaggtttaaatgattagactaaggcacctaacttatgtgagtgtcaggcttcaatgcctgtgttagagctactccttcacacaaaatagttcagaacatagagaaggaccaaggttaataaatgattttcatcccaaacactaaacatgattgatgggtagaggctgcccgaagtactgtgtaaagatggaatctgagatagaagaatgctgtggtcaattagtaattcttgcccatggagggattagtgacacatgccttgtatatttgtcatctgtggcctaaactctgcccctgaaggtttgttttctaattcagaggtttaaattaatctagcccacttaataaaaccagagatcctatgggaaatttagcctaagacagtgctggaaattgccatatgttgatacaaagaagtgtttggccacattacaggtctcagactcaactgctatgtgtgactgccgctctgtgcctatgtcttgcttttttgctgagttccctatttccatatctccaggtgaatccatgagaagcgagagggtggctgagaggcctgggcctctgggattccaccttgctatctctgctcttcaaccattgttttagactctgaacaccagatcctcatatctgaaagtgatttggaaacctgggcatcaagtgctcttttaagaaggggctatcccagaggactgttcaaaagtctcattcaatagagatgttggagtccagaacaaagttagggagcaaaccagtaacctatgctggtcgtaacagaggatcctacaattacgtttgtttttaagacaggattttgctgtgttgcccagactggtctcaaactcctgggttcaagagatccatcctcccacctcagtctcctgaaagctgggatgacaggcacatgccaccacacctagctccttacaaccatttattttaacttatttcatttataactggtatctttcatttgtatgtggcagctagagatttatataggatggaagtaatttatttttaatttaaatatttcatgttgaactgtttgccttgtatggaacattttacttggccaattcaaataaaaataaagtcagctttgtttgtgaaaaaaaaaaaaaaaaaagaaaaaaaaaaaaagaattctctccaggggtgaaaaaaaaaaagaggggggggcaaaaaaaaaag

SEQ ID NO: 7636 - DNA, 4596 bp, Homo sapiens
  misc_feature (844)..(886): n is a, c, g, or t
  misc_feature (1181)..(1196): n is a, c, g, or t
gacccgcgcgggatgtgaccccctgaccccctgcctggcctcccctgccccccagggggcccgcctttgcctgcttttgggggtgggtggggaggggcgcgcggatcatggcattggagttcccgggcttgcagccgccgccgccgcctcgttcacgcaccccgagcgccccttcttcccagagcagcagcggagaaggcgaagcggccggcgggggcgaggcagatggggctcaaggcgcgcagggcggcgggggcggctggcggcggcggcgacgggggcggcggaggcggcggggcggctaacccagccggaggggacgcggcggcggccggcgacgaggagcggaaagtggggctggcgcccggcgacgtggagcaagtcaccttggcgctcggggccggagccgacaaagacgggaccctgctgctggagggcggcggccgcgacgaggggcagcggaggaccccgcagggcatcgggctcctggccaagaccccgctgagccgcccagtcaagagaaacaacgccaagtaccggcgcatccaaactttgatctacgacgccctggagagaccgcggggctgggcgctgctttaccacgcgttggtgttcctgattgtcctggggtgcttgattctggctgtcctgaccacattcaaggagtatgagactgtctcgggagactggcttctgttactggagacatttgctattttcatctttggagccgagtttgctttgaggatctgggctgctggatgttgctgccgatacaaaggctggcggggccgactgaagtttgccaggaagcccctgtgcatgttggacatctttgtgctgnnnnnnnnnnnnnnnnnnnnnnnnnnnnnnnnnnnnnnnnnnnttctggccacctccctgcgaagcctgcgcttcctgcagatcctgcgcatgctgcggatggaccggagaggtggcacctggaagcttctgggctcagccatctgtgcccacagcaaagaactcatcacggcctggtacatcggtttcctgacactcatcctttcttcatttcttgtctacctggttgagaaagacgtcccagaggtggatgcacaaggagaggagatgaaagaggagtttgagacctatgcagatgccctgtggtggggcctgatcacactggccaccattggctnnnnnnnnnnnnnnnncaaaacgtgggaaggccgtctgattgccgccaccttttccttaattggcgtctccttttttgcccttccagcgggcatcctggggtccgggctggccctcaaggtgcaggagcaacaccgtcagaagcactttgagaaaaggaggaagccagctgctgagctcattcaggctgcctggaggtattatgctaccaaccccaacaggattgacctggtggcgacatggagattttatgaatcagtcgtctcttttcctttcttcaggaaagaacagctggaggcagcatccagccaaaagctgggtctcttggatcgggttcgcctttctaatcctcgtggtagcaatactaaaggaaagctatttacccctctgaatgtagatgccatagaagaaagtccttctaaagaaccaaagcctgttggcttaaacaataaagagcgtttccgcacggccttccgcatgaaagcctacgctttctggcagagttctgaagatgccgggacaggtgaccccatggcggaagacaggggctatgggaatgacttccccatcgaagacatgatccccaccctgaaggccgccatccgagccgtcagaattctacaattccgtctctataaaaaaaaattcaaggagactttgaggccttacgatgtgaaggatgtgattgagcagtattctgccgggcatctcgacatgctttccaggataaagtaccttcagacgagaatagatatgattttcacccctggacctccctccacgccaaaacacaagaagtctcagaaagggtcagcattcaccttcccatcccagcaatctcccaggaatgaaccatatgtagccagaccatccacatcagaaatcgaagaccaaagcatgatggggaagtttgtaaaagttgaaagacaggttcaggacatggggaagaagctggacttcctcgtggatatgcacatgcaacacatggaacggttgcaggtgcaggtcacggagtattacccaaccaagggcacctcctcgccagctgaagcagagaagaaggaggacaacaggtattccgatttgaaaaccatcatctgcaactattctgagacaggccccccggaaccaccctacagcttccaccaggtgaccattgacaaagtcagcccctatgggttttttgcacatgaccctgtgaacctgccccgagggggacccagttctggaaaggttcaggcaactcctccttcctcagcaacaacgtatgtggagaggcccacggtcctgcctatcttgactcttctcgactcccgagtgagctgccactcccaggctgacctgcagggcccctactcggaccgaatctccccccggcagagacgtagcatcacgcgagacagtgacacacctctgtccctgatgtcggtcaaccacgaggagctggagaggtctccaagtggcttcagcatctcccaggacagagatgattatgtgttcggccccaatggggggtcgagctggatgagggagaagcggtacctcgccgagggtgagacggacacagacacggaccccttcacgcccagcggctccatgcctctgtcgtccacaggggatgggatttctgattcagtatggaccccttccaataagcccatttaaaagaggtcactggctgacccctccttgtaatgtagacagactttgtatagttcacttactcttacacccgacgcttaccagcggggacaccaatggctgcatcaaatgcatgcgtgtgcgtggtggccccacccaggcaggggcttcccacagcctcttcctccccatgtcaccacaacaaagtgcttccttttcagcatggtttgcatgactttacactatataaatggttccgctaatctcttctaggataaaaaaaaaaaaaaaaaaaaaaaaattaatcacgattggaccagtacagggagaaattactgatgagccatgctatttgtctgtttggttggctggtttggtttttggtttggtaagcagagaaagtagtttaagttatttctaggatcactgccctcttgtgtaaaacgctagagcaattaactgtttttgaaagcaaggaaataattttctcaacaaaaccacattgtgtatcagtggggctgcctactgagctaacattaggaaaggaatgagatagtcattgtgtctctaaaacaaagaatttaaacaaatatttaaggcaaaaccttttaaaagctctccaaaagacctcacttggcctgatgttacttagtatcatgcctcagtttccttatctgtaaaaagtggtggtaatcccaagtgtagcatttctgatgagttatgaattggcagggagaaaacacacacacacacacacacacacacacacacacacatacacatagttaaaatagcttccaatttatgtagccaaggacaatggaatttatcagaagtgaagtgcccctctggaggagctgagttcagtgcctttaaaatgaatttccaactctcatttcttcccatgatactgaagtacaaaatatccatctaaaatagaaattaaagtcaagaaggcacacagaaattttctagtccaaggacttccttttataaatgaaggaatcttaggctcaggtaaagtgacatacccagagtcactcagttgtcccatagagaaccaggactcaaaagtcaggtctgcccactctccctgaccttgtttcccctcaccacaccattcttccatttatataatggcatcctagagattgtgtcaagatatatgactttgtgtcgcgtggaaagcacccagtttatccagcaggagggggatttccacttttattgcaaaacatgcttgcttgatgcaatgcatttcagatctagaaaaaaataatgcaagcaagctacatttacagatgtgtaaacaggcaaaatttccagaaccgtccaattttacttttccaaatttatggaaccaacccagattttttaacatgaaaatactaaaaccatatgtaaccgtaagacaagctaaaatgtaagcagacagcctgggaagcactgccctactgtacaggtgtgatattaagcacaagccatcctctggcctcttatgagatgtgttattctctgaaaaaactttgatggaacaaggttgctgttaggcttagactgaattagctaagatgaccatgcccacagtattattgtatcactcttctcaacacacctaggcactgggttgtggataaggttgccatggtgaccgatcaaggataatccaggatgaacctaaaccaaatgtctgttttgcagcttggaccactggtattctccctcaaagtcttggtgaaagagcccacgtagtattggggagaacatttggtgaaa

SEQ ID NO: 7637 - DNA, 1286 bp, Homo sapiens
  misc_feature (1088)..(1102): n is a, c, g, or t
tccagtctgggtgacagagcgagacttcctctcaaaaaaaaaaaaaaaaaggccaggggcggtggcttatgcctgtaatcccagcactttgggagcccaaggcgggcagatcacccgaagtcaggctggtcttgaagtcctgacctcagtgatccactcgcctcagccgaagtgctgcgattacagacctgagccactgcgcccagccttgatcttgaggtaagagggtactgtacagcagttactctatcataacacctaaataatgcctaaagttaaagagttttgatgaagttcttggcagcagtgcttttccccttctgctttccaaaaggaggtaaaaagaagccagtcaatttcaaaaacccctatcctgcttttattttcagctaccttgaaagtgagctgaatcaccatggaaatgtgcaaatgtgaggtttgcatacttggttttaatccctgagtaccatatgctaatcaggcaatcaggattctgtgcctccctgcagtcagttgcatttctatttaaaagtgcattttggtttggaagcccctttctggagcctaactaccaaaaggcagcaactttttgtatcattacaaagaaagctgtgtaagtgcactcccaagcaaaggtgtggtaggagagtagcagccacagaggacccaagcccaagtcttggcctgagttaagttagtgctattgctcccattgacgtgctatgatgtgaagccgtttctggtacagtgttcctttgctcagcaccttaaaagcttggatttaatagtaactgggtaaccttaatcagtagtcagaattatcaacactttgctttatttgacacaaccagactttctcagttcctgttctgtatctagagcaacgtcttcatactgttttttcacaaaatttttatttaaaacagttgtgacagccgaaggatttttttttttttttttacaaaattaaaatgaaataacttgtacaactggtgcgtaccatggctccagccagatgcccaaagcactggctattaattcctggagttcagatggtcagttgagtctatcctagttttttgcttcannnnnnnnnnnnnnnaactttctagaacgctgccactctttaaaggcttctcaatttcaaatttgaaaacttaattctcttcctcttagttttaaaggtgtacagtgttatctatgtgaagtatgtggtcgggcgctgtggctcaggccttgtatccaagaactttgggaggcttaggcaggagaatcgctcgaccccg

SEQ ID NO: 7638 - DNA, 3205 bp, Homo sapiens
  misc_feature (2086)..(2112): n is a, c, g, or t
tttctctcccatctggcagaggagtccggctccctaaatcttctttttgttgatgatcgccgggtgtcgatccttttccctccagtcagatgaggacactcagattcaaggacataagtgacttgtgcatagtcacacagctaggaggtggctgcaccaggattcagatgcagcctgtctgatgctgaccacatggtctgtggggtgctgcagaaagaaaactgcataaagaaggtgatcctggcctcggggagttcctggtgtgtgcctccagccagcgtggtaccctgcagagggcactccgacaaggtgagcgcttccgcggcggggcttctgtacagaggtcacagcacgctgtgtcccgggacgcacgcggattcctgcacaggtgtggtggctgcggatggggacggagcggagcaggctcgccggcctcctccccggcggcggctccgcttctccttcctgctgttcacttcatctcctcatctgcatgtgtgacagcggcgcgcggactggggaaggacagagcgccctctccccggctcccgtgcagcggggcgggggctccgggctccccagtgatgcgtcgtctgcgcctcgccgccgcgctccccgggcctggcagcggccaggcgtggacgccgccggaccgctgagactcggggcacggtgaagcactggccggggtctggctgggtctggcgctcgggagccagatggaggtggcgataggggccgtgggagccggcgccaagtagccggtggacccccgcgctcgcacctctcccggcgcccgggcgctccccaaggctgccatggaggtgcctaacgtcaaggacttccagtggaagcgcctggcgccactgcccagccgccgggtctactgctccctgctggagaccgggggccaggtctatgccatcgggggatgtgacgacaacggcgtccccatggactgcttcgaggtctactccccggaggccgaccagtggaccgccttgccccggctgcccacagcccgggcgggggtggccgtcaccgccctggggaagcggatcatggtgattgggggcgtgggcaccaatcagctgcccctgaaggtcgtggagatgtacaacatcgatgagggcaagtggaagaagaggagcatgctgcgtgaggccgccatgggcatttctgtcacggccaaagattaccgagtatatgcggcaggcgggatgggcctggacctacgtccacacaaccacctccaacactatgacatgctgaaggacatgtgggtgtccctagcacccatgcccaccccgagatatgctgccacctccttcctccgaggctccaagatctacgtgctggggggacgacagtccaagtacgcggtcaacgctttcgaggtctttgacatcgagactcgctcctggaccaagtttcccaacattccctataagcgggccttctccagctttgtgaccctggacaaccacttgtacagcctaggaggcctgcggcaaggtcgcctctaccggcagcccaagttcctgcggacgatggacgtgttcgacatggaacaggggggatggctgaagatggaacgatcgttcttcctcaagaagcggcgggcagattttgtggctggctctctgagtggacgggtcatagtggctgggggacttgggaatcaacccactgtcctggagacggcggaagcattccacccagggaagaacaaatgggagatcctccctgccatgcccacaccccgctgtgcctgctccagcatagtcgtcaagaactgcctcctcgccgtgggaggtgtcaaccagggtctgagtgacgcagtggaggccctgtgtgtctctgactcctagctgtctctgggctcagtacctttgccctggaccatatcacttcactcttaacatgaggaatgatcttgtccaagcagtcggggctacttccaagaatgtcagctcctgttagcaaccagtggagtctggccttggggctctaagttgacctctctatagctccaaatcctaccaatctcagaaaactgtaagaggcacagatgactccaccagcnnnnnnnnnnnnnnnnnnnnnnnnnnncacttactgcacaggcaaagaaaggcacaggaatatttcctacctctccctcctgtgagtcccacctccccccacccccatctccaggaggcaggtagagcagttctgaccgagaggatagactgctgttgctgtctttccccagctctgaactagttttaaggtagcttaggatgaaaaatggagaatgattgggggttccaaaccactttcttctcccttggcttatatctcttcaccatttggtggtcaactgtgggcctaccctggacctcatctactcagcgagaattggacatgaagctagaggcagctgccttggaagggaagtcaggctcacttggacagcccaggccatggcaggaagaatcccttcctcttggggtccttgatgggcatgtgtgatggggaaggagcagtctcccagccctgggtctgctccccacatctctcctaattccacttcaccttttgccaccccctccccaccagaggcctagcccttttgtcaccgaaggcccccagagtgtttctgtgtgaaaccctctcatttacactgtggcatcaaaatccacaaaagatggattaattgcactctggttaatagcagcagcacaatgattaaaatctatattcctatcttctctagcaccctggtgtggggatggggcggaagggtgtcttgaggggcagggaggaccccataaaacaatccctcctgcattctcaggctaaatagggcccccagtgactacctgttcttggctgtcccctctgaagagctctgccttctcacagccaccaccagttgccccactcccaggaaaacagcacatgttcttcttctcctgccttgagactgcgtgttagtcttccattcataactcatcagcagctcagtccttcttatgtctagtctcagttcattcagccaaagctcatttttgtcctatccaaagtagaaagggttcttttagaaaacttgaagaatgtgcctcctcttagcatctgtttctgactcccagttatttttaaaataaatgatgaataaaatgcctgccctgaagggttctggaagagtcaggtatcaatc

SEQ ID NO: 7639 - DNA, 6420 bp, Homo sapiens
  misc_feature (375)..(398): n is a, c, g, or t
  misc_feature (2769)..(2777): n is a, c, g, or t
gttttaccttacggtcgctgggaatctaagcaacaaagactagaagcctccgatatgccattatcaacacacaagagacaaacagcccgaggaagcactcaatgatgagagcagtagacctgccctggcagatgagagaggagaaactctccacaatgaaggaaaagcactgacagtatttgatagctttagtcaaactgtgcttgagtttggcttagatttatgccagtggaacctgtccttaccaaattcagagatgacccaagattctactctgtggtatgagggaaagacctctcgatatttatctcacaccaacggctttatcgtaggagcgtcttcgcctcccccgtttccagtagaaaagacagcttnnnnnnnnnnnnnnnnnnnnnnnncgcacctccagccccttctccccggggaagtaggccccgctaagaatgtgggaaggtggtggggcggcgactgaagtcgcttccgattggcgttgtcccaaggaagcctgcgcggattgatcggcggcaggcctccaatagagcctgctaggcggattggctgctacgcggctgggccctgtttccggtacctaggcgggcagccatggtgaccggcgagcggcatgcgacgccgcctctgtggcctgtggaggcccgcttggcggcgctgcttcccgacctactggtctttcggaagcctcggggatgggaacccgagctcgccacggcccagggcgtcctcctaggcgtccatgtgacgggtgagggcgacggccggcacttgcacttaagtctcctggcctgcgggagaggcggccgttgggtctaagctcctggaggcctcgacggttacaggcctagcctcccgcgagctaaggcacagtttaacttcgtgctgcggcttccttaggaaactttgagtatcttcgttttagcgtgggaggacatcttttgggatgaaccggctcagtccttgagctcaccccaaagatgatgaaattgaaactcagaggaaaggatttttacaggaccacgccccgggctttgaacccgtttttcccaaccccgagcattttctattaagcgttctgtttcaattattttattcgttcagttaattcgttcttggcgtcataagtatatgcccgccgttgttctggccgtagctatctagcagccactccgcgagtcgttcatttaacaaatacttactctgtgtcagggatatgaagatgggtaataccaggtgcctgtcctcactgtgtgagtggttctctagccagacatgaggagggatcctattgtttcccatagctaggcagcctaagagagtaggggaaagagctggctccagatgaaaagggcaccatctccagctcttggaagcagagagggtggtcctttggattcccagtggcagcagcaaccaacctggcccttagtagtttctaagttacaccatgttaatggataaaggaattactcagcttgaagggatctgtttcctttacactggcctgatgtgtggggagaaaggggccaaaaagtttaggatttggagttaacatcgtaatttctgctttgttggtcagggtttacagcattaatggacaggttcaccctgacctacaagtcggaacgtgacatggacaaactggcccatatcttcagttattacattagtgacatcgtggagcgtgagtgatcattgtagggtaacaaggtgtggtgctgggctcctgggggtttataaaagaagggggccagaagtactttaaaacaggtaccaaagggtcattcctttagcatcattcatctttggtttcttcaagttgccactgaaaagctagacctttgcctattatctgctaatctacccagtctcacattctattgactcattgttcaaagggggggcaggaggagctaatttcctttgcacatttgtattttatttcaaaataaagtattctcttctaacaataaagtaaaaaaaaaaagtattcagacaaaatttataaaacatctttttattattatattttgatcctgtgaggaaagaataggtgttttcttattttctgccatgtattaagcttttagatatttgccagatatccagtatctggaaaaaactcatttatgtagtacccatgttttgagtacctaccctgtgacatggactgtaataggtgcaggcagggcaagaacccactcttgaactttttagttaggcctacccaacagaaattactctgaccttataccttttagtacttacgtaacattctcatcctttactgacagtgccctgtatgcttccgtccatcattctgagattcaccagaataattactttgaggcatctccgttaagaatttgattatttgacttacctcttatccttaaggaacacatggaaggtcgtttgctttttcttataagtttggatgaaggggaagataaacattctatatcgtgtatgtactctaataccagcaacttctgggtactagaactacaggggaaagtaagacagagtaccctcgtggagtttccattttagtgggacagacaataaacacaataattgtagcttatatattctatcaaggaaataaacatagtatagtggtaaaaaaaaaacacaaaaaataattttagggtaggggagtatatgagacagggtggtcataggctcctctgaggaggtattatttaagctgacacttgaaggatgaggggaacagcttgtgaagaataggtaagnnnnnnnnncagacagaataccaagtgcaaaggtcctgagacaggagaaagctcggcatgctctaggagctaaaagaaggccagtgcaggccaaaacgtagctcgcagggtgaagagtggtttgaggcaaggttgggggatggtagctatgagaccaccacgctctgtagtccatagtgaagagttggaattatatatttctgtataaaggaaaactgtggaaaggtctagcaggggagtaatatgatctgattaacactttaaagctgattttggctaccttgtggagattgaatgctggtggaaagtgaatttaagaatagaagctggaagaggcaattgtcctggaaagatgttggagatttggtctagagcagtggttctcaacctcagctgtggttgcctgaggagctttttaattgttttttcttttttcttttttttttttgtaagagactggggtctcagtatgttgccaagtttgtcttgaactctagagcttaaaagattcttctgcctcaacctctcaaatagctaggactgcaggtaccataccaccttgtctaacaaaaaatcttaatgcctaagcttcaccccaggccatttaaatcggactttcttaaggttggcccaggaataagaccttttaaagtttcataggcaattccaatgtgcggtcaagactgaagattgttggtgtagaggtatggcaggggagctgtgtggggtagattaacctgaaatatattctgcaggttcaacagacaggagttgctaatacgttgaatttcagtgggaagtggtgagaaaaaggactcagttttttggctttcataaatgaattgatcgtgtcatttaccaagacaggaaagactgaacattgagaaagaaaatcaagagttctgttttgagtatgttgagtttgagatgccaataagtcattcaagtggagaatgactccattcaagtggagaatccagctatgattgagcctggagctcagagaagagatccctgttagagatgaaaatgtgagttgatggcataaagtgggacttaaagttaagaaccgattgagttcatgttgggagagcataaataaagagaaagagcctttggctgaggcttgaggaactccaggggaggattatgataagggagaaagaacctgaaaaagagactacaaacagccagtgaggtaggatattgtggtgttcctgaagccaaaggagaggtagtgtctctagaagaaagctgcagctagctgggttgaaaatgacagctgtcaagtacagtgaggtcagagaggtattgaatttagcaagattaatgctgttgatgaccttgataatttgaagtggtggaggtagaagtcagagtggagtaagctgaggaaaaagaatgacagagaaaacatttaagaggaagagtaaatgggagatgaggaaaatatatatagccaacttttttgagatttgggggttttgtttgttgtgaatgtagcaggaaaaaaaatggagctaataggcagaagataaggtagaaccaagaatatgtgggttatttttgtgtgttttggttttgttttttaagctattgatgagaatatttcagtagagagattaggaacggtgtgaagttcttgagaaggtaaaaggggataagattcctatcacaaatggggtggctttgaagagagcaggaattcttccattttagaaacgatgtatgtaggtgcagatagatttggggagaaaatgaaaagaaggaagaaggagcctgagtcttggagtgagcaaatggacaagaatgatgtcaggataaactcagtaggccattcttttgaccatatatgattctgccctgatctggtttatatctgattttgactcattttcctctctcttccttacttgatttcagatgttctctgttttggaggggatatcctaaatatcacaggtatttttttagtttttctgaatacttaaaagactgagtgaggaggactatatttaggtggaattcagcatattggtttattcagcattgtttgattaataggtactggaccctggggatacaaagatgaggaagacatagtctgtgcctcaaaggatcccccagtctaatggaaaagctttgcccaaattaaactctcacatgctttgcatttttgtttagattgaaggacagcaaaataagtgccaataaagcgttcttgagaaaactaatgagaaatttggtcattaatagcagaagctaagcatgagatggggaggagttaagcatgtcctatctggagaactcaggatcactaacagctgtatgccccggagttggcctgtcttcttatttaaacataataaaaccagccatcaaattagatatgaacttgaacccacattttatgaatcttttgctagtatctctcctcctctgttagtatactggtggaaggaagattgctaaaaatatccttaggatcatttaaacttctacctagttacgtttttactgaatgattttgaggatctgaagcagtattttaacctagcataatgtatacagccaagaaaccttgcctgataacttacttgatatccacactgggtcaagttgatcttctgcattactgggactttgccctggaccaagtaagtctagatatttggtccccatcagcctatcctgtgtgtctgcagggaacatgctcctggcactctggagagtagaacaaaatcaactgagtgacatcattaccttggtggcaaaatgcagtctggagatacaggagaaatttgggatctatcataccagggaaggccaggacctgcagttaaagataggtagtacctcctaaaagagtgatccagttgggcaagggggaacccactataaaaacctcaaaagataaatgataaactgggaaaaaatgtttgcaattcatatagacaaagggtgaattgctctactagggaaagagcacttagaaatcaagaaaacaatagtactcttaagagaaaaattggacaaaggacatgagtaaattgtatatagacaaggaaatgcatgtcttttaacacgtaaaaagatgatcaacattcataataagaaaaatgccaattggaagtacactgactacctgtcttacctatagataggcaaaacttcagatgctgacaatgtactctttggtgagtctgaggaatgagctttttcttactgtgagtgaacaacggtataaggtgatttggcaatctttatttatttttattgtctattgtatttttttatgtcaacaaaaactaaaccatataaaaatatatattaaaaagtcttgttttcacttatataccatctatactatttactcttacaagtgcatttattccttaacctagcaatccttctggacatctataggtatacgttcacacacctgaaatgttgcatgtgcaaggttattgattgtaatatggtttgtaattttaaaacattgaaaactatttataggagactggttaagtaaataatatgtatacttaataagattacctgcaacttaaaaaaaataagatgtcttgatatggcagtatctccaagatacagttaagtgaaaaaaaaaaaaaaaagaaaaaaaaaaaaaaaa

SEQ ID NO: 7640 - DNA, 1275 bp, Homo sapiens
aggctaggtagaggcgggggtgaatcggcagaggcttagctgaaaatagcagttaaaaaaatttaaatgttgcctgattatcagtacttaattatgttgtgcactaaaaccttaaatatttattactgtgaataaaaacaaattatctttactgtatagctggtttctttaaatgttgatagaatgtggcattacatctaaatttgtaagtcttttcatatcaaacaagcaaggctttttatgctgctaagtctgtgggtgcagaaagaaacaccccttggaagggcaaagagaagccggctggttgcatcaccccgtgcagtttctcacacacatctctttttctgattctgtgttcagaagaggctgccggcataaaacctaaatgcaaggttgacggagaacagcttgtctggcacaacaatggtgcaggcccacgagccagcatcacagcttggccatgggacgttgagtatgcacaaactagaactcttcccttcccaccttaggaatagaaaatcctcttcctttctaatctgaaaaacgaaaactgaacaaacacaaaaccaaccccttggcagttcccacctcctattgacatatggaatattgtgccttatgtaaaccagtttgaaaaatgttctgtaactaaagtgggttttcggctattatgtatacagcttggtatattactacgaaagataaccaccttgtgttgcaccttaaaaatatcaagaccatgtaatttccataacaaaataggtggcctggctatggtattatagcatacaattaggacactatgcccctgcaaaattttgtaaatcaaattcagaggcaaaaacatattttagaatcatacagtttgcacacgacaagtaggtaataactgtctctaaaaatgttttctccttagtccgcaatgagctaagattcagaatagtgtcaacagcatgctcctatatgaagttgttttttttaaagcacatttgtttatgacaagcctacattctcagtgaatatggcatttagtatttcttttgaaaacaaacttaagcatcatgagccaaagttgcactttgactcccaactacggtagcattatggacatctcacaatgtcaagggtttctgttatgtattagtaaagtatagattattggggcctacataatttaaaagaaatgtaaattaatattaaaagcttgtaaaaatatgtatatctttactatttctcaataaatacctttgcaattgtttaaatttccttcaaaaa

SEQ ID NO: 7641 - DNA, 1797 bp, Homo sapiens
caagctatccggttcaatgtgatgtccactaaattttggacatctaaatgtctgtgtagtataacttttattcgtaatgagttggtatctcagtggtaccttaggtctgtacattgacattcttgaggtttttagttttgcagaacactgaaatctatggactctaaaatggacttcatttaaagaaacccacggaccattaatggacaaaaacatgagtcaatatgtattgtggcattcaaatcctagcactctgggagagcatcaagtaccacgtttttgaagaccatggcctatcatcattatgcattcaagatttgagtttgaataacctcatcaagacttagatcttcttcagaagcttcaagtctcatctgcattaaagctctccattgaaccctctcacaaaagtacaagcttaaaggggctaaaatccattaatacattccattttatatcccttcctctgacttctcttcaatttccttggcctctagggtccttcatattgcttacgttcctttagactagagccaaggagacagtgctttccaaaaaaaaaaaaaaaaatgtgttctgtggccataagttttcattgatagagaagcataaatttggtgaatttagaattaggtcttttatcatatcctataaaaagttgagttaacaggctgggcacggtggctcatgcctgtaatcccagcactttgggaggccaaggcagctggatgccccaaggtcaggcatttgagaccagcctggccaacatggcgaaaccccatctctactaaaaatacaaaaattagccaggcatggtggcaggcgcctgtaatcccagctactcgagagactgaggcaggagaatcacttgaaaccaggaggcgggggctgcagtgagccaagatcacgccactgcattccagcctgggtgacagagcgagattccgtttaaaaaaaaaaaaaaagttgaattaacaataaggaaatgaggatgaagcggtaaaaatgttttgggttacattatactctcagaagctatgtggtttagagaaaagggcccccaaccacaaaagttagtggttcttattctgtctgcttcgtactaggtatatggtaactgagaaagtcacttaacctctctgaaccttaacttcgtcatctataaagtgaatctaacattttccccccggcctacctcacagggttgttgtgaggatcaaatgaaataatgtacatgaaaagacatatataaaatgtataatacagacaaagggtcctgttacacagttggaagtcattccctcagattttgggcctaggaaggtaggtgatttaaactcactgaaagcatgtaccatgtccaggttggatacatggcaacaaggctatgttaaattttttttctctgagttgagtccctaaaatactatcatgggctaattctaagaaggagcacgaatatatattcccctaaaattatagcttagcattgtcaatgctttagagcagttatgggagttatagattataacatattagtgatttgtgaaacttttttactaaaatgtgaccctcatttttctttacatgaaagaacatagaatatttcacaatgcatcccacgtggtaagaataaaaaattgttttagttatatgtacaaatgtgtgtgtgtgaacgtgtgtgtacttggtcattaaataaaatgtactttttttttcaaaaaaaaaacaaaaaaaggggggccaaaaaataaccagggcggccaatacgctacccgttttggcaaaggggcctag

SEQ ID NO: 7642 - DNA, 354 bp, Homo sapiens
ttttttttttttttttttttttagcgttatgattttattatttttcataaacccatttcacatatcaagcaatgcccaaggaaaagaaaactactatacatttattatttcacgtggttttgaaacttgaacaaatctcatttgaaaatagagaaaaatgcaatttttgcagagtagatggggaccacactgattccatttttaaaaaaggatttcctgtaaaaacagaaattggcaatttactctaagaaaacacagcagaagctgggaagaaacttgaggatgcctaaatttccactgtggaacaacttttgctgcccagtggggagagaataaaaaaaaaaaagaacacct

SEQ ID NO: 7643 - DNA, 2178 bp, Homo sapiens
  misc_feature (155)..(155): n is a, c, g, or t
gcggtatggcttcgtccgtgtttaacgatatgtcggggggcggaacccgactgtgtccttgagatggggggaggtgtatggtgttctacggtcatttggtgttaagcactcccaccgtgggcagagatggtggggataaaaccagtcctctgtcnttgttgttggccgatggtaagcccgctctcttcgttcttgactggtggcgggaagattgtggcccctgcgtaccaatcgcgcttcgtcacgcgctagatccgtgttttttgagcggcggcgccctctgtccgagaggtttgaaggtaacagaagtggtggcgggtgcgaggttgtaggtgtttccgggtgttccggagcgggaaggttgtcggcccccttttttttttcgcgcccattttagacccttttccaaaagtgtgggagtcggctctttttttggtccgggccccgacctctgttagggggcgtatttggcttcaaaataatcgcccttcggcccgttggaattctcggagttccccggcccgctatgaatttcctaaggtcctgctgtcggtaagcttttgctagagcatctcccgtaaggccaactttttcaagcccctcgtcttccgcaggcatgttttttcctttttccgggttgaaattttttttttcccctggagcctgttaatttttgtacgtaagttgttcaattttttccccccccataagtgaggttttttttccaagttcccaaggttgcaatttttcccctccgggcgttgtaaaatcgacggccagggcgtcgctttttatttgactccctataggggccccttttttcaagaaacctggggacgcctttttttggcccccccgggggatttttttaagggggcgcccttttttttttttttttttttttttttttttttttttttttttttttttttttttttttttttttttttttttttttttttttttagagatggaatcgcaagaattcccaggccctctttttatttacagtgataccaaaccatccacttgcaaattctttggtctcccatcagctggaattaagtaggtactgtgtatctttgagatcatgtatttgtctccactttggtggatacaagaaaggaaggcacgaacagctgaaaaagaagggtatcacaccgctccagctggaatccagcaggaacctctgagcatgccacagctgaacacttaaaagaggaaagaaggacagctgctcttcatttattttgaaagcaaattcatttgaaagtgcataaatggtcatcataagtcaaacgtatcaattagaccttcaacctaggaaacaaaattttttttttctatttaataatacaccacactgaaattatttgccaatgaatcccaaagatttggtacaaatagtacaattcgtatttgctttcctctttcctttcttcagacaaacaccaaataaaatgcaggtgaaagagatgaaccacgactagaggctgacttagaaatttatgctgactcgatctaaaaaaaattatgttggttaatgttaatctatctaaaaatagagcattttgggaatgcttttcaaagaaggtcaagtaacagtcatacagctagaaaagtccctgaaaaaaagaattgttaagaagtataataaccttttcaaaacccacaatgcagcttagttttcctttatttatttgtggtcatgaagactatccccatttctccataaaatcctccctccatactgctgcattatggcacaaaagactctaagtgccaccagacagaaggaccagagtttctgattataaacaatgatgctgggtaatgtttaaatgagaacattggatatggatggtcagatgaaagataccacaatgtcaccgcgcccgctaatggccgcaattccccgggcatttgttccgggatccgcccagcgggtaaactttggaataattgtatgtcgattatcgaaaactttttgcgcccatatcttgacacaagagacgatagactccggctatggtagtgcaaagaaagcccaaagagaggtacgattcagatcatcggggcgtatacacgttagcgcagacagagttcccaaaggggatgcaaagcaaaagaacaagtgagagtaagccagaccacattaagaaagcagatagttcatcg

SEQ ID NO: 7644 - DNA, 3452 bp, Homo sapiens
  misc_feature (2995)..(3059): n is a, c, g, or t
  misc_feature (3061)..(3078): n is a, c, g, or t
  misc_feature (3080)..(3130): n is a, c, g, or t
  misc_feature (3132)..(3158): n is a, c, g, or t
  misc_feature (3160)..(3176): n is a, c, g, or t
  misc_feature (3178)..(3181): n is a, c, g, or t
  misc_feature (3185)..(3192): n is a, c, g, or t
  misc_feature (3198)..(3202): n is a, c, g, or t
  misc_feature (3222)..(3223): n is a, c, g, or t
  misc_feature (3228)..(3230): n is a, c, g, or t
  misc_feature (3242)..(3249): n is a, c, g, or t
  misc_feature (3251)..(3252): n is a, c, g, or t
  misc_feature (3258)..(3261): n is a, c, g, or t
  misc_feature (3266)..(3267): n is a, c, g, or t
  misc_feature (3286)..(3287): n is a, c, g, or t
  misc_feature (3306)..(3307): n is a, c, g, or t
  misc_feature (3342)..(3344): n is a, c, g, or t
  misc_feature (3368)..(3371): n is a, c, g, or t
  misc_feature (3386)..(3386): n is a, c, g, or t
  misc_feature (3425)..(3426): n is a, c, g, or t
aaaaaaaactctggggatctatcgagagggcagttggcgggactgggcactccccttccttctccctcccactgtccccagaaatcttcccatccctccacctccccaagccctaagtcctctcgggctctgcccttcagggcagcgggtgttggggatgtccagctcctgagccctcttgcacggaggctctgcacggaggcaagacaaggggttcagctctgtcccttatctgaggtgggagggggaagggaattatggaaggaatccagctggcctgttagtaagggtgttccagtgctaggtggaggtggagtttggctgcctttggggagtttggaagggtgaggaatagaggcctgatttctgagtgttgtttctgtgttggacaattctatgcaaactagagccaaaatggaagagggtgcaagtcccctcctggggccccagacgccccctcctttcttgctgcctggagcaggggcagtgctgttagtggctactcctggtgtgaacagcccatcctggccaccttccacaggaaacctgacctgaaggacagaagaggaaggaagcaggctttgccacaaatgtcagtgcagaactctggctggccccaccaagaagacagccccaagccccaggatccaggtccaccagccaactcagacagtgactcaggccacctgccgggggaggaccctgaggatacccatgctcagggtcctgcagttctgagcttgggttccctttgcctggacaccaaccaagcccccaactggactggacttcagaccctcctgcagcaactccctccgcaggacattgatgagcgctactgcctggcccttggggaggaggagcgggccgagctgcagctcttctgtgccaggcggaagcaggaagccctgggacagggggtagcccgcctggtacttcccaagcttgaaggacacacctgtgagaagtgtagggagctgctgaagccaggggagtacggagtgtttgcagcccgggcaggggaacagcgctgctggcaccagccttgctttgcctgccaggcctgtggccaggccctgataaacctcatctacttctaccatgatggacaactctactgcggccgtcatcatgcagagttgctgcgcccgcgctgcccggcttgtgaccagctgatcttctcctggcgctgcaccgaggcggagggacagcgctggcatgagaaccacttctgttgccaggactgcgccgggcctctgggcgggggacgttatgccctgcctgggggaagcccctgctgccccagctgcttcgagaaccgctactcggatgcaggctcgagctgggccggggcactggaagggcaggcatgaactggggagactggactcgaccgaactgaaggaagggaccaaacctcggtgaactctgcaaccctctcccgaacactcctcgctgctgccggcggttccagcctgcaaactcagagggggctgcctggatccagtccccagcaggagaaccgacctggggacaaagcggaggcacccaaagggcaggagcaatgccgcctggagactattcgtgatcccaaggacacccctttctccacctgctcctcctcctctgactcggaacctgaaggatttttcttaggcgagcgccttccccagtcctggaagacccccggaagcctccaagcagaggacagcaacgcctctaagacgcactgcaccatgtgctagtggcgcagctcagagaggggatgtgagtgggaggaaaggggtctgtaaagcgggagaacaaggctagcctccccctaacaatcctagactgagacgcagtcaggcgcacgcccgcaagaggcggcgaggtgacaagtttggagtgcgcccccttcagtactgcgcgttctaagacttttggcggagactttcttggcaaaacccattccccaaagctacgcttcccctgctgagatagcccctacccccacctccacaggctgggacagccccgtccccaccatcctcctcccaagccaattaaatgatcacagcacgcgtgacagttaccggctggagagccggaggtgggaccgggagcaggggaccgtagaaccgggccgcgctcctcccctcctagagttcgtggaggcgcagcagagggccgtccctcttccggatgtcggactaagcgaacagcgcccccactgccggccggtagcagccggaagtgccagaccggaggtgcgtcattcaccggcgacgccgatacggttcctccaccgaggcccatgcgaagctttccactatggcttccagcactgtcccggtgagcgctgctggctcggctaatgaaactcccgaaataccggacaacgtgggagattggcttcggggcgtctaccgctttgccactgataggaatgacttccggaggaacttgatactaaatttgggactctttgctgcgggagtttggctggccaggaacttgagtgacattgacctcatggcacctcagccaggggtgtagccaagtagacaaatggaatcctgtgctgaacccgaatcttccaaaaaacagcctacaatctgtgaccaccacaagatgtgccctgatggcagctgaagtttgattcagatgggcacttttcttccccttccctgcctagtttccttttgttccttgagtccacgcagaattccattctctggtcagcagacaggcttaagctaaagtattgcctctattctgtaaagttctgtacatagttcccaagcttctgcagggggtgatttttgctcttgtcctgagaaataacagtgctgttttaaaaaacatttgaaataaataccgcacacaaaggcaaaaaaaaaaaaaaaaaaaaaaaaaaaaaaaaaaaaaaaaaaaaaaaaaaaaaaaaaaaaaaaaaaaaagatataaaaaaaaaaaaaaaaaaaaaaaaaccttgtgggccgcctggcccaannnnnnnnnnnnnnnnnnnnnnnnnnnnnnnnnnnnnnnnnnnnnnnnnnnnnnnnnnnnnnnnngnnnnnnnnnnnnnnnnnnannnnnnnnnnnnnnnnnnnnnnnnnnnnnnnnnnnnnnnnnnnnnnnnnnnannnnnnnnnnnnnnnnnnnnnnnnnnnannnnnnnnnnnnnnnnnannnnaaannnnnnnnaaaaannnnnaaaaaaaaaaaggaaaaaannaaaannnggggaaaaaaannnnnnnnannaaaaannnnaaaannaaaaaaaaaaatttatttnnaagaaaaaaaaaaaaattnnggagggggggggggggagagaaaaaagggaggaannngaggggggaggggaaaggaaaggnnnnatagggggggggggntagaaaaggaaaaaattaaagagaggggggagagggagnngtgggggagaggagtttatgtgtggg

SEQ ID NO: 7645 - DNA, 3048 bp, Homo sapiens; identical to SEQ ID NO: 7482
  misc_feature (244)..(288): n is a, c, g, or t
  misc_feature (656)..(675): n is a, c, g, or t
  misc_feature (3031)..(3046): n is a, c, g, or t

SEQ ID NO: 7646 - DNA, 372 bp, Homo sapiens
ttttggtgtcttataagttttaattgctcaaagaaactatggtccatgggaaagggaaggagtggagctgagttaatgaatgattcaaactagttttccaaggggccctgcaagggaaagaaagttgactaacatatgtgctgggtagccatgcccagagagagcaaaccctttcatgggtgaaacactcttcaggtttcaggtcattttagggacttgctggtgaatggctagccacaaaggtaacatttatcaagttactcaggttaagttcatcattaaatttcctattttctttctcctggaatctcgtgggttttgtttaatgttggagacagatggtgctgaggcatttcaggtgttagttgatga

SEQ ID NO: 7647 - DNA, 2535 bp, Homo sapiens
  misc_feature (340)..(401): n is a, c, g, or t
  misc_feature (553)..(568): n is a, c, g, or t
atctgtgggagcagtttattccagtatcacccagggtgcagccacaccaggactgtgttgaagggtgttttttttcttttaaatgtaatacctcctcatcttttcttcttacacagtgtctgagaacatttacattatagataagtagtacatggtggataacttctacttttaggaggactactctcttctgacagtcctagactggtcttctacactaagacaccatgaaggagtatgtgctcctattattcctggctttgtgctctgccaaacccttctttagcccttcacacatcgcactgaagaatatgatgctgaaggatatggaagacacagnnnnnnnnnnnnnnnnnnnnnnnnnnnnnnnnnnnnnnnnnnnnnnnnnnnnnnnnnnnnnnctttttccaacaagagagccaagaagccatttttttccatttgatctgtttccaatgtgtccatttggatgtcagtgctattcacgagttgtacattgctcagatttaggtttgacctcagtcccaaccaacattccatttgatactcgaannnnnnnnnnnnnnnnacaataaaattaaggaaatcaaagaaaatgattttaaaggactcacttcactttatggtctgatcctgaacaacaacaagctaacgaagattcacccaaaagcctttctaaccacaaagaagttgcgaaggctgtatctgtcccacaatcaactaagtgaaataccacttaatcttcccaaatcattagcagaactcagaattcatgaaaataaagttaagaaaatacaaaaggacacattcaaaggaatgaatgctttacacgttttggaaatgagtgcaaaccctcttgataataatgggatagagccaggggcatttgaaggggtgacggtgttccatatcagaattgcagaagcaaaactgacctcagttcctaaaggcttaccaccaactttattggagcttcacttagattataataaaatttcaacagtggaacttgaggattttaaacgatacaaagaactacaaaggctgggcctaggaaacaacaaaatcacagatatcgaaaatgggagtcttgctaacataccacgtgtgagagaaatacatttggaaaacaataaactaaaaaaatccattcagggttaccaggttgaatacctccagatatcttccttcattctaattcaattgcaagagtgggagtaaatgacttctgtccaacagtgccaaagatgaagaaatctttatacagtgcaataagtttattcaacaacccggtgaaatactgggaaatgcaacctgcaacatttcgttgtgttttgagcagaatgagtgttcagcttgggaactttggaatgtaataattagtaattggtaatgtccatttaatataagattcaaaaatccctacatttggaatacttgaactctattaataatggtagtattatatatacaagcaaatatctattctcaagtggtaagtccactgacttattttatgacaagaaatttcaacggaattttgccaaactattgatacataagggttgagagaaacaagcatctattgcagtttctttttgcgtacaaatgatcttacataaatctcatgcttgaccattcctttcttcataacaaaaaagtaagatattcggtatttaacactttgttatcaagcacattttaaaaagagctgtactgtaaatggaatgcttgacttagcaaaatttgtgctctttcatttgctgttagaaaaacagaattaacaaagacagtaatgtgaagagtgcattacactattcttattctttagtagcttgggtagtactgtaatatttttaatcatcttaaagtatgatttgatataatcttattgaaattaccttatcatgtcttagagcccgtctttatgtttaaaactaatttcttaaaataaagccttcagtaaatgttcattaccaacttgataaatgctactcataagagctggtttggggctatagcatatgcttttttttttttaattattacctgatttaaaaatctctgtaaaaacgtgtagtgtttcataaaatctgtaactcgcattttaatgatccgctattataagcttttaatagcatgaaaattgttaggctatataacattgccacttcaactctaaggaatatttttgagatatccctttggaagaccttgcttggaagagcctggacactaacaattctacaccaaattgtctcttcaaatacgtatggactggataactctgagaaacacatctagtataactgaataagcagagcatcaaattaaacagacagaaaccgaaagctctatataaatgctcagagttctttatgtatttcttattggcattcaacatatgtaaaatcagaaaacagggaaattttcattaaaaatattggtttgaaaaaaaaaaaaaaaaaaaaaaaaaaaaaaaaaaaaaaaaaaaaaaaaaaaaaaaaaaaaaaaaaaaaaaacaaacaaccatgt

SEQ ID NO: 7648 - DNA, 1116 bp, Homo sapiens
  misc_feature (3)..(3): n is a, c, g, or t
  misc_feature (16)..(16): n is a, c, g, or t
  misc_feature (21)..(21): n is a, c, g, or t
  misc_feature (30)..(30): n is a, c, g, or t
ccngattttaatacgnccccncctttgggnaattttgcccctcgaggccaagaattcggcccggggttttttttttttttttggttttggagaccagagtcttcgctccgtcgcccaggctggagtgcagtggcgccaagcttctgtcttcaaaacaaacaaacaaacaaaagacccaatctgagtcttatcgttgtactgatagaagggtcagatatccccacatggagttgagtgggagaaagagattcactagagaataactccttagagaccaatgtctgtagcaggtgtacagcatcttgtgaaagttatggagcatgaaaagactgaagggccaggacagtttgcatgggctgagttataccagctagaccaggaatagaacaaagaattctatacctcaggatttcaaaaagttagcaacttgagaggccagtgctgagcaacccagtacccaggaaatgaaaaaaagaaagaaaattccctccgagaatgaacaaatcattggcttcattgcctcatgagcttgagagaaaggagaagagagccagagtgtggcaagtgaggccaaaatcagaagcatggcagaaatgagtgtaagtgattgagccacagacagaagtgtggcgagggacaatgccatattgggagaaggtaaagttgagtaacaagaaaccaaccgtgtgtgagagggggattggaaaaaaatttgagggagaagaatgttagaatggaagggaatgatggtggaagggaggtgtgagggtgtgtgctgagtgttgaaagaacggttggtgtctgtgtgattttccttgagtctgttcttcagtgtgtcttctgcagcttgccatgactgcctgggaaagagtagggaaatacccagagccaaaacctcctttcagtcccaccccatccctcaaaaccccagctattgcttcttttcagcttcaggtcctgatctccaatcttagtatggactcccttctcaccaagaccaccaccagctacgtttgctgtgtaatctggaaagtgataatttcctttgcttgttgggtgtgagtcacaatactttggtttgtgcacaagaataaatttatgccccataacttcaaa

SEQ ID NO: 7649 - DNA, 1789 bp, Homo sapiens
  misc_feature (1182)..(1182): n is a, c, g, or t
  misc_feature (1357)..(1357): n is a, c, g, or t
agcggagtccaacatggcggcgcccagcggagggtggaacggcgtcggcgcgagcttgtgggccgcgctgctcctaggggccgtggcgctgaggccggcggaggcggtgtccgagcccacgacggtggcgtttgacgtgcggcccggcggcgtcgtgcattccttctcccataacgtgggcccgggggacaaatatacgtgtatgttcacttacgcctctcaaggagggaccaatgagcaatggcagatgagtctggggaccagcgaagaccaccagcacttcacctgcaccatctggaggccccaggggaagtcctatctgtacttcacacagttcaaggcagaggtgcggggcgctgagattgagtacgccatggcctactctaaagccgcatttgaaagggaaagtgatgtccctctgaaaactgaggaatttgaagtgaccaaaacagcagtggctcacaggcccggggcattcaaagctgagctgtccaagctggtgattgtggccaaggcatcgcgcactgagctgtgaccagcagccctgttgcgggtggcaccttctcatctccggtgaagctgaaggggcctgtgtccctgaaagggccagcacatcactggttttctaggagggactcttaagttttctacctgggctgacgttgccttgtccggaggggcttgcagggtggctgaagccctggggcagagaacagagggtccagggccctcctggctcccaacagcttctcagttcccacttcctgctgagctcttctggactcaggatcgcagatccggggcacaaagagggtggggaacatgggggctatgctggggaaagcagccatgctccccccgacctccagccgagcatccttcatgagcctgcagaactgctttcctatgtttacccaggggacctcctttcagatgaactgggaagagatgaaatgttttttcatatttaaataaataagaacattaaaaagcaaaaaaaaaaaaaaaaaaaaaaaaagggcggggggcggcagaaaaagaaggaaatggcaaatgggcaccaatgggtcccataagacctgggtttcccctggaaaccccaggctttttttcccttgggaaacaacaaaggcgggggtcaaaaaaaatccctgggcccccgcggagtctcctccccccctnaaaataaacacatgcgggaaaaaatttccccccataaaaaatttctacaaaaaggttttttttcttcggctggaactaattataataggcgcgccccccccaggcgggggtttcttaaaaaaaaaccaccctctggggcgaagtttttttaaaaaattgggggggaaaaaccacnggaggaggccttttggccccccaaaacttaaacccccccccggggggagcgaaaaaaaattttgtttaaagaaaacccccccatgacaacccctataaaaattggtggaaaacccccgggaggggaccccaacgcagtccaagacacaattttgggcgaaggggagaaaccgcccgcccacaaaagggggagaaatacccactttcccctcctttgcggaaacgaaaaaaccccccctttttttttttttttttttccccgtggggcgacgaaaggaaaacaaatcgccccgggcgcgtggggccgcctttggggcccaaataacaccaacaacacccaaaagacgccccctcccccggccttttaacgccaaaaacccggggatgtgcggaaatcctatgcacttttctgcaccccgagaaaaaaatccta

SEQ ID NO: 7650 - DNA, 2750 bp, Homo sapiens
  misc_feature (1677)..(1690): n is a, c, g, or t
atttttccctgaatgaggtaagcttttaaatacttatattgcaatctgtatttcatgtttgtccatgtcctgatttgtgtttatttgccatggttagatatttacccatattttcttacagttaatttttttgtttaatttttaattcatttgaaattgtgttgaaacttttttcacagtcccatatgggcatttggtccatgcccaaaagactaaacaagggcatgcttggaaattgcaaaatgaaaaggcttagacatgctacggtagtatacagactcttcgagcaaagattccaagaatcttctggattcaggtttcttttgacagcccaacctattctcttatgagggagctgtaacctcagcccacagtttcctaaagatttcggatgagttcttggggcgctggggtcgtgatcacaggcagtacacctgttttcatggtcgaagatgttacttgattttctcacatgccttgcctgctattaataagatacacagaattagggacttttgctatggattattcagacaaacagcctcaaacctcaaaccatctcaagccatgcctacattatctttgtcaaagggtcaaaggttataggagcatttggaattttattttaattcttcacttgcactttttgggacagtgtgcaggtggggtgctggggccaagatacagcagaggccaatcagaactcaggagaaatgtggcaggagcaggaagaaggcagaacaaattctactcgttgaaaggcctcaagttctgggtgattatgaacctgaaccccaggatctagaaatagatgttgcaatggaaatcagtgtcagattagcagggcagatgtttaaatggcccaagatagatgcaaatgctttgactttgtaaaaataattattgccaattgaagccccaaggagtcaaagcagccttcctgtctatatcctccactgtgtgtgccctcccaccctcctataaaagcaactaagggaagccctgggctgccaaatggcaagttgagactgagagggtgccttggtgggctgtaagggtttgactggagaaaggagggtgatttttttttttttttctcataggcaccagcaaagagacatctaacaaggagatgaccttcaaggctgtctccatacctagatatttgagtgcacggcctggagatagagggcagggactgtggcgaggccgccgcccagtggataaccagcttcctgaagtcacagccctaccgcctggtgcacttcgagcctcacatgcgaccgagacgtcctcatcaaatagcagacttgttccgacccaaggaccagattgcttactcagacaccagcccattcttgatcctttctgaggcgtcgctggcggatctcaactccaggctagagaagaaagttaaagcaaccaacttcaggcccaatattgtaatttcaggatgcgatgtctatgcagaggattcttgggatgagcttcttattggtgacgtggaactgaaaagggtgatggcttgttccagatgcattttaaccacagtggacccagacaccggtgtcatgagcaggaaggaaccgctggaaacactgaagagttatcgccagtgtgacccttcagaacgaaagttatatggaaaatcaccactctttgggcagtattttgtgnnnnnnnnnnnnnngggaccatcaaagtgggagaccctgtgtacctgctgggccagtaatgggaaccgtatgtcctggaatattagatgccttttaaaaatgttctcaaaaatgacaacacttgaagcatggtgtttcagaactgagacctctacattttctttaaatttgtgattttcacatttttcgtcttttggacttctggtgtctcaatgcttcaatgtcccagtgcaaaaagtaaagaaatatagtctcaataacttagtaggacttcagtaagtcacttaaatgacaagacaggattctgaaaactccccgtttaactgattatggaatagttctttctcctgcttctccgtttatctaccaagagcgcagacttgcatcctgtcactaccactcgttagagaaagagaagaagagaaagaggaagagtgggtgggctggaagaatgtcctagaatgtgttattgcccctgttcatgaggtacgcaatgaaaattaaattgcaccccaaatatggctggaatgccacttcccttttcttctcaagccccgggctagcttttgaaatggcataaagactgaggtgaccttcaggaagcactgcagatattaattttccatagatctggatctggccctgctgcttctcagacagcattggatttcctaaaggtgctcaggaggatggttgtgtagtcatggaggacccctggatccttgccattcccctcagctaatgacggagtgctccttctccagttccgggtgaaaaagttctgaattctgtggaggagaagaaaagtgattcagtgatttcagatagactactgaaaacctttaaagggggaaaaggaaagcatatgtcagttgtttaaaacccaatatctattttttaactgattgtataactctaagatctgatgaagtatattttttattgccattttgtcctttgattatattgggaagttgactaaacttgaaaaatgtttttaaaactgtgaataaatggaagctactttgactagtaaaaaaaaaaaaaaaagaaccatccatagccacacaaagg

SEQ ID NO: 7651 - DNA, 1319 bp, Homo sapiens
ttttttttttttttttttcgtattctcatatttaatagattttaagacttcaaaacgacacaaagaggatcagaacccgtatgtgatatttttgtgcgtcctgtctggtgaccgttggttcaccttatctctgtttccctttcaggtgctgctagctgaggaggggatagctcctctttcttctgcaggaccagggaaagaggagaaactcctgtttggagaagggttttctcctttgcttccagttcagactatcaaggaggaagaaatccagccttccctgatctttgcagggtggtccgtgtaaatagtataaattctccaaattatcctctaattataaatgtaagcttatttccttagatcattatccagagactgccagaaggtgggtaggatgacctggggtttcaattgacttctgttccttgcttttagttttgatagaagggaagacctgcagtgcacggtttcttccaggctgaggtacctggatcttgggttcttcactgcagggacccagacaagtggatctgcttgccagagtcctttttgcccctccctgccacctccccgtgtttccaagtcagctttcctgcaagaagaaatcctggttaaaaaagtcttttgtattgggtcaggagttgaatttggggtgggaggatggatgcaactgaagcagagtgtgggtgcccagatgtgcgctattagatgtttctctgataatgtccccaatcataccagggagactggcattgacgagaactcaggtggaggcttgagaaggccgaaagggcccctgacctgcctggcttccttagcttgcccctcagctttgcaaagagccaccctaggccccagctgaccgcatgggtgtgagccagcttgagaacactaactactcaataaaagcgaaggtggacatgctgggctctgtggtttattggcgtctgattcctaaggcaccaggagaggctggaaaagaaagagggtgttgatggagacgatggtgatagggaagaggcaaggcctgaagttcacccaaagcagcagttggagcacttgcacaggcacacacttgacaacacaaattgccagttttcccagtgctagtcctgcacagctcacctcttttccctggcgtctctgaccttgttccttgggacctttggacctgctggttaacttaggccttttgagggttcttaataagacaagctcacgaggggtagggccccctgaacattagggcaggaagggcccagttacaggtgcttcattcccactgccatccccaccctgaggcctgggagccagcc

SEQ ID NO: 7652 - DNA, 1289 bp, Homo sapiens
  misc_feature (76)..(90): n is a, c, g, or t
gggagggagagaggcgcgcgggtgaaaggcgcattggcacgaggctgcggcggcctcggagcgcggcggagccagnnnnnnnnnnnnnnnctctcctcggtctcctccgcctccagctccgcgctgcccggcagccgggagccatgcgaccccagggccccgccgcctccccgcagcggctccgcggcctcctgctgctcctgctgctgcagctgcccgcgccgtcgagcgcctctgagatccccaaggggaagcaaaaggcgcagctccggcagagggaggtggtggacctgtataatggaatgtgcttacaagggccagcaggagtgcctggtcgagacgggagccctggggccaatggcattccgggtacacctgggatcccaggtcgggatggattcaaaggagaaaagggggaatgtctgagggaaagctttgaggagtcctggacacccaactacaagcagtgttcatggagttcattgaattatggcatagatcttgggaaaattgcggagtgtacatttacaaagatgcgttcaaatagtgctctaagagttttgttcagtggctcacttcggctaaaatgcagaaatgcatgctgtcagcgttggtatttcacattcaatggagctgaatgttcaggacctcttcccattgaagctataatttatttggaccaaggaagccctgaaatgaattcaacaattaatattcatcgcacttcttctgtggaaggactttgtgaaggaattggtgctggattagtggatgttgctatctgggttggcacttgttcagattacccaaaaggagatgcttctactggatggaattcagtttctcgcatcattattgaagaactaccaaaataaatgctttaattttcatttgctacctctttttttattatgccttggaatggttcacttaaatgacattttaaataagtttatgtatacatctgaatgaaaagcaaagctaaatatgtttacagaccaaagtgtgatttcacactgtttttaaatctagcattattcattttgcttcaatcaaaagtggtttcaatattttttttagttggttagaatactttcttcatagtcacattctctcaacctataatttggaatattgttgtggtcttttgttttttctcttagtatagcatttttaaaaaaatataaaagctaccaatctttgtacaatttgtaaatgttaagaattttttttatatctgttaaataaaaattatttccaacaaaaaaaaaaaaaaaaaaaaaaaaaaa

SEQ ID NO: 7653 - DNA, 2056 bp, Homo sapiens
tcgcagacagctcgggggaacagtggcggcttcggccggcggtccttgcgctccccaacagcggcgcgggcgggtgagccgtcggggcacagtcccggtgctcttctgtttctcagtcttcgcgcgaccctcgtgcggtgccacacggggcgggctacgagctgctcatccagaagttcctcagcctgtacggcgaccagatcgacatgcaccgcaaattcgtggtgcagctgttcgccgaggagtggggccagtacgtggacttgcccaagggtttcgcggtgagcgagcgctgcaaggtgcgcctcgtgccgctgcagatccagctcactaccctgggaaatcttacaccttcaagcactgtgtttttctgctgtgatatgcaggaaaggttcagaccagccatcaagtattttggggatattattagcgtgggacagagattgttgcaaggggcccggattttaggaattcctgttattgtaacagaacaataccctaaaggtcttgggagcacggttcaagaaattgatttaacaggtgtaaaactggtacttccaaagaccaagttttcaatggtattaccagaagtagaagcggcattagcagagattcccggagtcaggagtgttgtattatttggagtagaaactcatgtgtgcatccaacaaactgccctggagctagttggccgaggagtcgaggttcacattgttgctgatgccacctcatcaagaagcatgatggacaggatgtttgcacgcctcacgtctcgctcgaacggggatcatagtgaccacgagtgaggctgttctgcgttcagctggtagctgataaggacgcatcgcaaaattcaaggaaattcagaatctaattaaggacgagtgctccagagtcgggtctgctttccaaagtataggacatttgaagaactggtatgctactcactggtgaaggacagtcaggtgaaggactgtaagcccacacaagctcttcttatctctactagaattaaaatgttaagtcaaaaacggctccttttttgcgcctcctagtgaaacttaaccagctagaccatttgagtaccagcatttagttacaaacgtcaaaggcttccggtgctgcttaccttccttttttgttaatgtgcttttatttattaaaaaaaattacaatgaagatgcctgttttgtctctactgtgtactctgatcgtatctttccaaagtgcagactcttgtgaagttttcttaaattgttcactttaaagaaaatgacgtaccaacaatgatttggcttttatattactgtaagatgttataatgttaatgtggatgtagtgcttttactttacagattgattggaataagattattgcatatgaatttacccacaggactctgaatcatgttacccactcccctcacaatgttgtccacttagtgagttgcattgatctatccgtaccaaatgatgttgaataattacatatctttctttactatactgatttcttattttggtcactattactaaatctctgttaatattctctcttttaactgaaaagggatgggatagaagggtttgcaatgccatattattggtggagggctgttttaacatctttgaagtatggcttgctgaatatctttaccaacatcttgaatatatattctagtgtccacaagatttagcaaaaagataaagcttgggtggaatatcattttaaaatgttcatgttctgttctatattttcttcacctactctccaaatattgtaatgcaaaaagtctcagtaatgatttggtagtattaattttgtggtcattgtttctcttcgataaatttattttcattaaatacttattagagggttttgaaatgtttttcaaatatgtgaaatgtgaaactgctgtcttttatattaaagtaattaaagaaaatgtattgtgattgaaattattttggcctccacaagatggctctatgagtattcttccagggattctaatatttatttaaggtaataaaatcttgacatttataatctttc

SEQ ID NO: 7654 - DNA, 1245 bp, Homo sapiens
aaggcttggcacgaggagatggacggccgccgtgttttgggccggttctggagtggctggcggcggggcctgggtgtccgcccagtgcccgaggacgcaggctttggcaccgaagcccggcatcagaggcaaccccgcggctcctgccaacggtcggggcccctcggggaccagcccttcgcggggctgctgccaaaaaacctcagtcgggaggagctggttgatgcgctgcgggcagccgtggtggaccggaaaggacctctagtgacgttgaacaagccacagggtctaccagtgacaggaaaaccaggagagctgacgttgttctcagtgctgccagagctgagccagtccctagggctcagggagcaggagcttcaggttgtccgagcatctgggaaagaaagctctgggcttgtactcctctccagctgtccccagacagctagtcgcctccagaagtacttcacccatgcacggagagcccaaaggcccacagccacctactgtgctgtcactgatgggatcccagctgcttctgaggggaagatccaggctgccctgaaactggaacacattgatggggtcaatctcacagttccagtgaaggccccatcccgaaaggacatcctggaaggtgtcaagaagactctcagtcactttcgtgtggtagccacaggctctggctgtgccctggtccagctgcagccactgacagtgttctccagtcaactacaggtgcacatggtactacagctctgccctgtgcttggggaccacatgtactctgcccgtgtgggcactgtcctgggccagcgatttctgctgccagctgagaacaacaagccccaaagacaggtcctggatgaagccctcctcagacgcctccacctgaccccctcccaggctgcccagctgcccttgcacctccacctacatcggctccttctcccaggcaccagggccagggacacccctgttgagctcctggcaccactgcccccttatttctccaggaccctacagtgcctggggctccgcttacaatagtcctccctctgttcctgaccccctcacacacactggaaagtgagggtgggggctctgcagtcagacaaacctaagatcacatcctggacaggccacttgcttgctgtgtggcattgggcaagtaactttacctctctggacttgtgataataaaagttcctacctcaaaaaaaaaaaaaaaaaaaaaaaacgcgg

SEQ ID NO: 7655 - DNA, 902 bp, Homo sapiens
cacagccaggcgggacgcgcacagtccctccacgcggaaagaagtaccttcgccggtcaccggctcctgcagggtgcaaatatatacagagcttcataatcagcccaagaccacatagagcaaacatgaatgatatttcccaaaaggctgagattctgctttcttcatctaaacctgtcccaaaaacctatgtaccaaaacttggcaagggtgatgtaaaggataagtttgaagccatgcagagagccaggaagaaagaaatcaaaggagatctagagacgaaaaacaaagaagaaaagaacaatatattagagagagagaatggaacaggagaaagcaggagattaaagaaatgttgcttctgatgatgaggaagatgtatcttctaaagtagaaaaggcttatgttccaaaattaacaggaactgtgaagggtagatttgctgaaatggagaaacaaagacaagaggaacaaaggaagagaacggaggaggaacgaaaacgcagaattgagcaggatatgttagaaaagaggaaaatacaggtgaattagcaaaaggggtgaacaggaaggcgatgattcactacttatactgtggtactgtgcaaatcatataaacatctgcgcaatggacagatttgggggtctagaaaagacgtggagaagaaggtcacgtcgagggaataaccgatagatttgcgaaaagagcatttccaggagaagggttctagttggtgggagacaacggggccaaaaaactttccggaaggaggattggaagggcgaaaaaagacagaatggggcgacttaacaagggtttcgaaggggggatatgaaacacaaatgcggctctttaagaaaacaaggaaaaaccgtgggcgcggtgtactaggacacaccgt

SEQ ID NO: 7656 - DNA, 2578 bp, Homo sapiens
gaagccagggggactgcgcgcgtgagcgtcacgcatgcggggtcaacggatgggtgcttggtgctctgggcactgcaggggtgctggctggactgcggttaccgcagcgcggaaccccctaggcgcggccgcgtcggacctgtggtcccgggtttctgcagagtctacttcagaagcggaggcactgggagtccggtttgggattgccaggctgtggttgtgagtctgagcttgtgagcggctgtggcgccccaactcttcgccagcatatcatcccggcaggcgataaactacattcagttgagtctgcaagactgggaggaactggggtgataagaaatctatccactgtcaaggtttattgaagtcaaaatgtccaaaaaaatcagtggcggttctgtggtagagatgcaaggagatgaaatgacacgaatcatttgggaattgattaaagagaaactcatttttccctacgtggaattggatctacatagctatgatttaggcatagagaatcgtgatgccaccaacgaccaagtcaccaaggatgctgcagaagctataaagaagcataatgttggcgtcaaatgtgccactatcactcctgatgagaagagggttgaggagttcaagttgaaacaaatgtggaaatcaccaaatggcaccatacgaaatattctgggtggcacggtcttcagagaagccattatctgcaaaaatatcccccggcttgtgagtggatgggtaaaacctatcatcataggtcgtcatgcttatggggatcaatacagagcaactgattttgttgttcctgggcctggaaaagtagagataacctacacaccaagtgacggaacccaaaaggtgacatacctggtacataactttgaagaaggtggtggtgttgccatggggatgtataatcaagataagtcaattgaagattttgcacacagttccttccaaatggctctgtctaagggttggcctttgtatctgagcaccaaaaacactattctgaagaaatatgatgggcgttttaaagacatctttcaggagatatatgacaagcagtacaagtcccagtttgaagctcaaaagatctggtatgagcataggctcatcgacgacatggtggcccaagctatgaaatcagagggaggcttcatctgggcctgtaaaaactatgatggtgacgtgcagtcggactctgtggcccaagggtatggctctctcggcatgatgaccagcgtgctggtttgtccagatggcaagacagtagaagcagaggctgcccacgggactgtaacccgtcactaccgcatgtaccagaaaggacaggagacgtccaccaatcccattgcttccatttttgcctggaccagagggttagcccacagagcaaagcttgataacaataaagagcttgccttctttgcaaatgctttggaagaagtctctattgagacaattgaggctggcttcatgaccaaggacttggctgcttgcattaaaggtttacccaatgtgcaacgttctgactacttgaatacatttgagttcatggataaacttggagaaaacttgaagatcaaactagctcaggccaaactttaagttcatacctgagctaagaaggataattgtcttttggtaactaggtctacaggtttacatttttctgtgttacactcaaggataaaggcaaaatcaattttgtaatttgtttagaagccagagtttatcttttctataagtttacagcctttttcttatatatacagttattgccacctttgtgaacatggcaagggacttttttacaatttttattttattttctagtaccagcctaggaattcggttagtactcatttgtattcactgtcactttttctcatgttctaattataaatgaccaaaatcaagattgctcaaaagggtaaatgatagccacagtattgctccctaaaatatgcataaagtagaaattcactgccttcccctcctgtccatgaccttgggcacagggaagttctggtgtcatagatatcccgttttggtgaggtagagctgtgcattaaacttgcacatgactggaacgaagtatgagtgcaactcaaatgtgttgaagatactgcagtcatttttgtaaagaccttgctgaatgtttccaatagactaaatactgtttaggccgcaggagagtttggaatccggaataaatactacctggaggtttgtcctctccatttttctctttctcctcctggcctggcctgaatattatactactctaaatagcatatttcatccaagtgcaataatgtaagctgaatcttttttggacttctgctggcctgttttatttcttttatataaatgtgatttctcagaaattgatattaaacactatcttatcttctcctgaactgttgattttaattaaaattaagtgctaattaccaaaaaaaaaaaaaaaaaaaaaaaaaaaaaaaaaaaaaaaaaaaaaaaaaaaaaaaaaaaagactttacggcggtaccccagcccttttccttggtaacacaagaggggcgc

SEQ ID NO: 7657 - DNA, 887 bp, Homo sapiens
aaaaggccggcggaacagccagaggagcagagaggcaaagaaacattgtgaaatctccaactcttaaccttcaacatgaaagtctctgcagtgcttctgtgcctgctgctcatgacagcagctttcaacccccagggacttgctcagccagatgcactcaacgtcccatctacttgctgcttcacatttagcagtaagaagatctccttgcagaggctgaagagctatgtgatcaccaccagcaggtgtccccagaaggctgtcatcttcagaaccaaactgggcaaggagatctgtgctgacccaaaggagaagtgggtccagaattatatgaaacacctgggccggaaagctcacaccctgaagacttgaactctgctacccctactgaaatcaagctggagtacgtgaaatgacttttccattctcctctggcctcctcttctatgctttggaatacttctaccataattttcaaataggatgcattcggttttgtgattcaaaatgtactatgtgttaagtaatattggctattatttgacttgttgctggtttggagtttatttgagtattgctgatcttttctaaagcaaggccttgagcaagtaggttgctgtctctaagcccccttcccttccactatgagctgctggcagtgggtttgtattcggttcccaggggttgagagcatgcctgtgggagtcatggacatgaagggatgctgcaatgtaggaaggagagctctttgtgaatgtgaggtgttgctaaatatgttattgtggaaagatgaatgcaatagtaggactgctgacattttgcagaaaatacattttatttaaaatctcctaaaaaaaaaaaaaaaaaaaaaaaagaaaaaaaaaaaa

SEQ ID NO: 7658 - DNA, 2178 bp, Homo sapiens
caagacttctctgcattttctgccaaaatctgtgtcagatttaagacacatgcttctgcaagcttccatgaaggttgtgcaaaaaagtttcaatccagagttgggttccagctttctgtagctgtaagcattggtggccacaccacctccttacaaagcaactagaacctgcggcatacattggagagatttttttaattttctggacatgaagtaaatttagagtgctttctaatttcaggtagaagacatgtccaccttctgattatttttggagaacattttgatttttttcatctctctctccccacccctaagattgtgcaaaaaaagcgtaccttgcctaattgaaataatttcattggattttgatcagaactgattatttggttttctgtgtgaagttttgaggtttcaaactttccttctggagaatgccttttgaaacaattttctctagctgcctgatgtcaactgcttagtaatcagtggatattgaaatattcaaaatgtacagagagtgggtagtggtgaatgttttcatgatgttgtacgtccagctggtgcagggctccagtaatgaacatggaccagtgaagcgatcatctcagtccacattggaacgatctgaacagcagatcagggctgcttctagtttggaggaactacttcgaattactcactctgaggactggaagctgtggagatgcaggctgaggctcaaaagttttaccagtatggactctcgctcagcatcccatcggtccactaggtttgcggcaactttctatgacattgaaacactaaaagttatagatgaagaatggcaaagaactcagtgcagccctagagaaacgtgcgtggaggtggccagtgagctggggaagagtaccaacacattcttcaagcccccttgtgtgaacgtgttccgatgtggtggctgttgcaatgaagagagccttatctgtatgaacaccagcacctcgtacatttccaaacagctctttgagatatcagtgcctttgacatcagtacctgaattagtgcctgttaaagttgccaatcatacaggttgtaagtgcttgccaacagccccccgccatccatactcaattatcagaagatccatccagatccctgaagaagatcgctgttcccattccaagaaactctgtcctattgacatgctatgggatagcaacaaatgtaaatgtgttttgcaggaggaaaatccacttgctggaacagaagaccactctcatctccaggaaccagctctctgtgggccacacatgatgtttgacgaagatcgttgcgagtgtgtctgtaaaacaccatgtcccaaagatctaatccagcaccccaaaaactgcagttgctttgagtgcaaagaaagtctggagacctgctgccagaagcacaagctatttcacccagacacctgcagctgtgaggacagatgcccctttcataccagaccatgtgcaagtggcaaaacagcatgtgcaaagcattgccgctttccaaaggagaaaagggctgcccaggggccccacagccgaaagaatccttgattcagcgttccaagttccccatccctgtcatttttaacagcatgctgctttgccaagttgctgtcactgtttttttcccaggtgttaaaaaaaaaatccattttacacagcaccacagtgaatccagaccaaccttccattcacaccagctaaggagtccctggttcattgatggatgtcttctagctgcagatgcctctgcgcaccaaggaatggagaggaggggacccatgtaatccttttgtttagttttgtttttgttttttggtgaatgagaaaggtgtgctggtcatggaatggcaggtgtcatatgactgattactcagagcagatgaggaaaactgtagtctctgagtcctttgctaatcgcaactcttgtgaattattctgattcttttttatgcagaatttgattcgtatgatcagtactgactttctgattactgtccagcttatagtcttccagtttaatgaactaccatctgatgtttcatatttaagtgtatttaaagaaaataaacaccattattcaagccaaaaaaaaaaaaaaaaaaaaaaaaaaaaaaaaaaaaaaaaaaaaaaaaaaaaaaaaaaaaaaaaaaaa

SEQ ID NO: 7659 - DNA, 1338 bp, Homo sapiens
tgtcaaatcagattctccattgctatagtgtacagtgcacacagctcatattgcttccttcctgggtgctgataaaaataagaaagagcatggaaattggtttcttgaatataagctttaatttttaaggcttaaaagtattcatagaggtagactgtatgataaataaaaacaaatttaattcacaaagttatctgtacactgcagttttaaaatataccaactaaattatgggtttctggaagtgaatggagaaaacagcaagggaagaaatcgtttttaagataagtaaataattcccatggattgataaatattttccttttaaaatgttatggactgatattttttattcacctttaaatttcttatcaagaagtttatctttgtttttcagatttaaaaatgaaatacaggtattcgtcactttcctgaaaccatgctaaccaaaatcagtagccaaaccaattcagatagatgtgtctcatctaattaaacccattggtttttatgggagggctgcattaagagcacccaaccaccacatgtaagttgataattaccagcatggcaggtgattttatctgctgaccaagcgcatagttttgttttgttttcagaatgttctagggaacatttgagattttatgtgaaataaaattttaagtgccaaagccaaaaaaatacttaactcttttcaaaggccctctttcatccttgccttcgtcaactttcctttgcacacaggaagcaaaatctacttcaagacatttattttagaggaatccattaagaaaggattgttttacttaaatgaaatgctgtcttaattttttgctggtgtcctttggacaccctccttaagcctttaacaattcttcctttttaacccaagcccattatggcaaaggtttttcaaaggagaggagggggaaaggaggacagatgaaagtgacgggaaatgagaaagaagaggagtgaggaaacagttatttccttatgaatcctgtgtgtttcttggaagaaagagctgtccgaggaagttgggtccagctgtggtgatcagaggtatatcctcgaacaaaagaaacctaatggaaagtgggagaaaaggccacaggaaccttcaagtgacccccaatcagtgtcaaactaacactagattccagtggttggcgggggggcgagacggtggcccgcgtgacccgtgaaggggcaatctgcccacctccagggacctgggagaaaaccccaatcttatggaagggtgccacacgtggagcaaccggcagcggggccacagcacggaaaggcccaacgccgtgataccccgcggga

SEQ ID NO: 7660 - DNA, 1433 bp, Homo sapiens
ttttaagagacagattctcgctctagagccctgcctggagtacagtggcacaatctgagctcactgtaacctctgcctcccaggttcaagtgattctcctgccttagcctcccaaatagctgggattacaggcatgcggcaggagaactgtttgaacccgggagatggaggttgcagtgagctgagatggtgccactgcactccagcctgggcaagagagtgagactgtctcaaacaaaacaaaacaaaaaaaaactaggtaaaaatctggtcacttaatggctgcgtaacctggaacaagtgattccagctccttctagctctagaactatgctcctggatctcactgcgactctgatcagggtaggaagagtagaacatggtatattctgcatgccaccagcactcagtctttgggctatgagaaggatactccccctagagcagtggactgaattgttaactgagctagagcttccccaaccccccaaggaagacactgcagtggcagtgtaggcctggaaatctgggacaggaaatcataaataccagttactgtgttggacaggtcaaatgattgctgacaaggtaaaaacctcccctccctgtgccacatcccgattcttgctcctggggtacagccaccaggaccaagtcaaacctgcactctgagaatgggaagggatgctgaactctcactttctaagaaccctgagccccactctaggtctgggaatggaaaacccatcgaatggagttctgagcagggatacgggctctaactctggactttccatcgtatctctatgtgactgcacgcaagttactctatccaggcttattagctggatgtaataagcccaaggaaggcccaaggcctgatgctggatactatgtgtgatactatgtgtctggccgagtctggggacacaatgtagcttattactacgttttacatcttagtaataagaaaaaaaacgaaatttctatgtgtcctcctttgttctaatctatgtagccaagaaaggattaggatgatcctttctttgatctggcttgtggcagagataagagaacaggggcgagaatcaaaaactggttaaaaatctgagtcagtcacttaatggctgtgtgacctggaacaagtgatttaactttctggaggctaaacttcatctttttttttttttttaagagacagagtctcgctctagagccctgcctggagtacagtggcacaatctgagctcactgtaacctctgcctcccaggttcaagtgattctcctgcctcagcctcccaagtagctggggatacaggcatgcgcccaccatgtctgggctaatctttggatttttattaaaagatggagttttggccattgttagccaaggcttggttctcaactcctgagcctacatgaatcacctgcc

SEQ ID NO: 7661 - DNA, 466 bp, Homo sapiens
aagtacatcagagagctactaaggcagcacaaaattaagagtgaagataccagagacaaacagaagaggtaaatgtcacatttggtaccttacttccactcagggcaaataagaggctgggaagctgagaaactgagtagagttgccagcagtgctaggaggctgaggggtccataaatattaataatcaggaccaatgagggaccctggtacacaccacaagctttcttttgtgacctcactgagaggagaaccagaaatagactggtcatcacaaacactgaagcccaatttccctccagctcagccccagatagggtctgggcaaactacctcagggtatggacaaatcacatcaaatcacatgaattaaaaaaaaaaatcctctttggggttatgataatatgattcagagctacaaattgtctttgcaatttctttttcatttaccatgtctggctgtcaa

SEQ ID NO: 7662 - DNA, 357 bp, Homo sapiens
gcggccgccgcgcttccgactctcccaggccgcaccgcgcgccgcgacggctacagcccagccatgtgcgtgcgacggggaggccgcaccaaggccgcggggcggggggcgcacccacgccctggggcctcacgaacgaccctgagaggactcgcatccacaagaccgcgcccgaaaatcatcaaactgatatatttgtgacaagaaagtgcttaattccattcagcaaggttgtttctgtgcatcagtaaactcatgggagcattgaccaccccatgtgtggcagcagatggttccgtccaacatggcgtcctccccctttcctttcccgtcggacgctgcggggcgggactgaac

SEQ ID NO: 7663 - DNA, 1437 bp, Homo sapiens
gccacttccgggagtcggaaaggaaagctgtgggaccatcctggcaaccccggtgtttggctgggttctagcgtaccggtctgtgtggccggtgggggacctgcggtcggagtgggagggccagtctgcacccaagaggtggaagaggacgggctttaggctggaacgccttagaggagccatttttccaggtggggccccagcagaggctccgacaggagctggccatagtcgcgcagccggggaggtggagcgcgtcccagacccgagcccccgacctcagccaaacccattccttctgtccttggaggccagaggggactctgagcatcggaaaggatgcctggtttgcttttatgtgaaccgacagagctttacaacatcctgaatcaggccacaaaactctccagattaacagaccccaactatctctgtttattggatgtccgttccaaatgggagtatgacgaaagccatgtgatcactgcccttcgagtgaagaagaaaaataatgaatatcttctcccggagtctgtggacctggagtgtgtgaagtactgcgtggtgtatgataacaacagcagcaccctggagatactcttaaaagatgatgatgatgattcagactctgatggtgatggcaaagatcttgtgcctcaagcagccattgagtatggcaggatcctgacccgcctcacccaccaccccgtctacatcctgaaagggggctatgagcgcttctcaggcacgtaccactttctccggacccagaagatcatctggatgcctcaggaactggatgcatttcagccataccccattgaaatcgtgccagggaaggtcttcgttggcaatttcagtcaagcctgtgaccccaagattcagaaggacttgaaaatcaaagcccatgtcaatgtctccatggatacagggcccttttttgcaggcgatgctgacaagcttctgcacatccggatagaagattccccggaagcccagattcttcccttcttacgccacatgtgtcacttcattgaaattcaccatcaccttggctctgtcattctgatcttttccacccagggtatcagccgcagttgtgccgccatcatagcctacctcatgcatagtaacgagcagaccttgcagaggtcctgggcctatgtcaagaagtgcaaaaacaacatgtgtccaaatcggggattggtgagccagctgctggaatgggagaagactatccttggagattccatcacaaacatcatggatccgctctactgatcttctccgaggcccaccgaagggtactgaagagcctcacctgggggcattttgtgggtggagggccagagtgtgtatacccaggcttgtctggaaggagaaggcctttgctgcctgaaagtctcaaaaaaaaaaaaaaaaaaaaaaagaggaagc

SEQ ID NO: 7664 - DNA, 3388 bp, Homo sapiens
  misc_feature (2070)..(2095): n is a, c, g, or t
aaaaaaaacttactgtcagaggttacctacaagtgtttgaacaggtaacttctacctttgaacttctgttgtgacagattcaaaggttccaggggagtgtgttggccactctcaggacagtacacagtagcttcgggtgtgtcccagtcagtcctaggagctgtggaaagagtagaagtgcctgaatgtggtgctgaatcaatacagcctgctgtgaggggagcacttcctggacccaggaagggagagtcttcttccaaggtctgaatttcctgctgctgttcacaaagatgctttttatctttaactttttgttttccccacttccgaccccggcgttgatctgcatcctgacatttggagctgccatcttcttgtggctgatcaccagacctcaacccgtcttacctcttcttgacctgaacaatcagtctgtgggaattgagggaggagcacggaagggggtttcccagaagaacaatgacctaacaagttgctgcttctcagatgccaagactatgtatgaggttttccaaagaggactcgctgtgtctgacaatgggccctgcttgggatatagaaaaccaaaccagccctacagatggctatcttacaaacaggtgtctgatagagcagagtacctgggttcctgtctcttgcataaaggttataaatcatcaccagaccagtttgtcggcatctttgctcagaataggccagagtggatcatctccgaattggcttgttacacgtactctatggtagctgtacctctgtatgacaccttgggaccagaagccatcgtacatattgtcaacaaggctgatatcgccatggtgatctgtgacacaccccaaaaggcattggtgctgatagggaatgtagagaaaggcttcaccccgagcctgaaggtgatcatccttatggacccctttgatgatgacctgaagcaaagaggggagaagagtggaattgagatcttatccctatatgatgctgagaacctaggcaaagagcacttcagaaaacctgtgcctcctagcccagaagacctgagcgtcatctgcttcaccagtgggaccacaggtgaccccaaaggagccatgataacccatcaaaatattgtttcaaatgctgctgcctttctcaaatgtgtggagcatgcttatgagcccactcctgatgatgtggccatatcctacctccctctggctcatatgtttgagaggattgtacaggctgttgtgtacagctgtggagccagagttggattcttccaaggggatattcggttgctggctgacgacatgaagactttgaagcccacattgtttcccgcggtgcctcgactccttaacaggatctacgataaggtacaaaatgaggccaagacacccttgaagaagttcttgttgaagctggctgtttccagtaaattcaaagagcttcaaaagggtatcatcaggcatgatagtttctgggacaagctcatctttgcaaagatccaggacagcctgggcggaagggttcgtgtaattgtcactggagctgcccccatgtccacttcagtcatgacattcttccgggcagcaatgggatgtcaggtgtatgaagcttatggtcaaacagaatgcacaggtggctgtacatttacattacctggggactggacatcaggtcacgttggggtgcccctggcttgcaattacgtgaagctggaagatgtggctgacatgaactactttacagtgaataatgaaggagaggtctgcatcaagggtacaaacgtgttcaaaggatacctgaaggaccctgagaagacacaggaagccctggacagtgatggctggcttcacacaggagacattggtcgctgctcccgaaatggaacttctgaagatcatcgaccgtaaaaagaacattttcaagctggcccaaggagaatacattgcaccagagaagatagaaaatatctacaacaggagtcaaccagtgttacaaatttttgtacacggggagagcttacggtcatccttagtaggagtggtggttcctgacacagatgtactnnnnnnnnnnnnnnnnnnnnnnnnnngggtgaagggctcctttgaggaactgtgccaaaaccaagttgtaagggaagccattttagaagacttgcagaaaattgggaaagaaagtggccttaaaacttttgaacaggtcaaagccatttttcttcatccagagccattttccattgaaaatgggctcttgacaccaacattgaaagcaaagcgaggagagctttccaaatactttcggacccaaattgacagcctgtatgagcacatccaggattaggataaggtacttaagtacctgccggcccactgtgcactgcttgtgagaaaatggattaaaaactattcttacatttgttttgcctttcctcctatttttttttaacctgttaaactctaaagccatagcttttgttttatattgagacatataatgtgtaaacttagttcccaaataaatcaatcctgtctttcccatcttcgatgttgctaatattaaggcttcagggctacttttatcaacatgcctgtcttcaagatcccagtttatgttctgtgtccttcctcatgatttccaaccttaatactattagtaaccacaagttcaagggtcaaagggaccctctgtgccttcttctttgttttgtgataaacataacttgccaacagtctctatgcttatttacatcttctactgttcaaactaagagatttttaaattctgaaaaactgcttacaattcatgttttctagccactccacaaaccactaaaattttagttttagcctatcactcatgtcaatcaatctatgagacaaatgtctccgatgctcttctgcgtaaattaaattgtgtactgaagggaaaagtttgatcataccaaacatttcctaaactctctagttagatatctgacttgggagtattaaaaattgggtctatgacatactgtccaaaaggaatgctgttcttaaagcattatttacagtaggaactggggagtaaatctgttccctacagtttgctgctgagctggaagctgtgggggaaggagttgacaggtgggcccagtgaacttttccagtaaatgaagcaagcactgaataaaaacctcctgaactgggaacaaagatctacaggcaagcaagatgcccacacaacaggcttattttctgtgaaggaaccaactgatctcccccacccttggattagagttcctgctctaccttacccacagataacacatgttgtttctacttgtaaatgtaaagtctttaaaataaactattacagataaaaaaaaaaaaaaaaaaaaaaaaaa

SEQ ID NO: 7665 - DNA, 1848 bp, Homo sapiens
cagctttgcgatccagcagagagggctggagacgggacgaaggccacaacagacccggccctgccagcgggcggtggcgcctccagatcagagccctcgggaaggaggcctgggcgggcctggcccgttcacctgtgtgccctgcagttctgcccgaggctcaactctcaagggcctgggaggggtgctgccggccaagagggtccaggacctcactggactgtgccccacagggagatcccgaagagcctgtttctgtccctcggggagccaggagggaaccaggaccatgttccagtaaatgaggactgcagcaggagccgtgagccctgactcccggccagagacacgacgtcagaccagaaagaatgaggaggccgcgtggggcccgcgggtgtgcagggcagagagggaggacaacaggaagtgccccccctccatcctgaaacggagccggccggagcaccaccgcccagaggccaagccccagaggacctcgaggcgcgtgtggttccgagaacccccagcggtgaccgtccactacattgctgacaagaacgccacagccactgtcagggtgcccggccggcccaggccacacggcggctccctgctcctgcagctgtgtgtgtgcgtcctgctcgtgctggccctgggcctatactgcggccgggccaagcccgtggcaacggcactggaggacctgcgggcccggctcctcggccttgtcctgcacctgcggcacgtggccctcacctgctggcgcggcctcctgcggctctgacgggcaggacgggcaggacgggcagggcttccaggagagctcaagcactccgggggctccgagacagcctgagccctggccctgctgcttggtgaatcatgggggccaaaaggggctgctgcctgagggctaactaggaaaagggggaccccgtggcgtgagatcggacatggggggcacagcgggcggccccgccacactagtcagcacagccctcctgtctcctgtgttgggtccatgtgagattttattagaaagaggattcgactgctaacagttgaggctccccaggctcacccaaagacccctccctcgtcccagcaggaactcctgctgctgctagggcctggcccggccatcaccgtgtgcaccctcttgaggagggggacacactgcccgtgttcaaggggctgctcggaggaggcaaacccagccttttgcgattatggcttgtggggaatccagacctcgaaaccccacggggagggaagggtctggttgtcaaggtgggtccctttgatgtgaggtgccatcctctgagcccaggtctgacccccctacccagccccgtgagtctggagaggccccagggaaggacccctcatcaggggcggcttcaggtgtagaagccgaggggacagcaaggggcccagacacccccgaccttcagaacagccatctgtgcccagctctgcaggccaggcacacccagctgagcccggggccagccagcaccacccaccagctggggcctgtgggtcccggagaccgtctgtggttgtggctttgtcgccggattgcagagctgaagggagccctgtggatgacaaacaccaggggcctctccagaccctacgtggggggagggctgaacaaagcagggaggcccacggttagacaccaggcagaactgcccaggagagacacagggacaatcagaccagcgtcctcgaggttagcctgaggcgggtgggcacggccgaccatccacccggtggttcctgtttgtcccaccacttaactgggagacactgttttattaaaacacaccgtggcttccttca

SEQ ID NO: 7666 - DNA, 1916 bp, Homo sapiens; identical to SEQ ID NO: 7534

SEQ ID NO: 7667 - DNA, 1696 bp, Homo sapiens
ccggagcggggatcaccttaacttgactgtggtcccccagccctccaagaaatgcccataaaccaaggaggagagggtaaaaaatagaagaatacatggaattggggagaagaatgggaaaaaagatgggagtgactgcataatgtcagcattttgtgcttttggctcagcatttggattggatggaggattttcatcctgaaaccagccctccgtcgccaccgaccatggaataattgtcttccacgaaactcttccctggtgccaaaaagggttttatgtatatatttgagagctccacatccctggatctgaatcctccacttcccactggaaccatgcccctcccagtcccgtttctcccctctaggggatggaggctgagagaccccaggaagaagaggatggtgagcagggcccccctcaggatgaggaaggctggccccctccaaactccaccactcggccttggcgatctgctcctccatcccctcctcctccagggacccgccacacagccctgggaccccgctcggcctccctgctctccctgcagactgaactccttctggacctggtggctgaagcccagtcccgccgcctggaggagcagagggccaccttctacaccccccaaaacccctcaagcctagcccctgccccactccgtcctctcgaggacagagaacagctttacagcactatcctcagtcaccagtgccagcggatggaagcccagcggtcagagcctcccctccctccaggggggcaagagctcctggagttgctgctgagagttcagggtgggggtcgaatggaggagcaaaggtcccggccccccacacacacctgctgagacttgagccccaaccagcccttccttgccactggtctcaaagctgggcagcccattgcatgccctcaactcttgcttggcaggggtaccagagactgaaagacacggcacaaatctcaatattcatctcccacatcaccttccctgggaactggacagggtgaaagtcctcaaactctgggaacaggcgagatggaacagggatttaactccccgcccacaggtccatgggagcttgaggcagtaagggggatcccaggcacccatctcaaggagtggctgggagtcttttccctaacttgtggggacaccaccagttgtcaagctactaggcagtagggtctgagggctcaggcctccacctgagaggttataacctgagagacagctctacccttcctcccagtaagaagggaaggtgggtgggcacctgagagattaagactattctcccagtcccactaccagcacccccgatccctgagactgaggggtttacgggctgtgaatggaccttcagccctgcccaccctccctccccactgctgctgagtctgtctgatgttttggttgtgtgaataaatataattcccctctggaaaaaaaaaaaaaaaaaaaaaaaaggggggcgcgtatgaaaaaatcgttagggggaccagagttgcgtgtaaccctgttttggtacaaggggccatatagggggggtatataacagagatgggcgttttcaagttggggggaaaccgttattgaacttgggggaaccaattggggcgaaaggaaccaccaagattaagctaggaattattaggagtgacacgtatcgggagtgcgtttgac

SEQ ID NO: 7668 - DNA, 871 bp, Homo sapiens
  misc_feature (5)..(5): n is a, c, g, or t
  misc_feature (7)..(7): n is a, c, g, or t
  misc_feature (9)..(9): n is a, c, g, or t
  misc_feature (12)..(12): n is a, c, g, or t
ccctngncnatntttcccaggtggtgaatgccctggagtggtgagggtgtgagggtcgcgttcctgctgtctggactttttctgtcccactgagacgcagctgtgtgaaatatgatttggcgaggaagatcaacatataggcctaggccgaggagaagtgtaccacctcctgagctgattgggcctatgctggagcccggtgatgaggagcctcagcaagaggaaccaccaactgaaagtcgggatcctgcacctggtcaggagagagaagaagatcagggtgcagctgagactcaagtgcctgacctggaagctgatctccaggagctgtctcagtcaaagactgggggtgaatgtggaaatggtcctgatgaccaggggaagattctgccaaaatcagaacaatttaaaatgccagaaggaggtgacaggcaaccacaggtttaaatgaagacaagctgaaacaacacaaaactgtttttatctaagatatttgacttaaaaatatcgaaataaacttttgcagctttctccaaaaaaaaaaaaaaaaaaaaaaaaaaaaaacagtgtggggggcatggggccttggaggaaagtctccaaagacacttccgtagggcgcgcgggggcacacacaggtgcacgtgagcaccggcgcaaacacgagggtcccccgaaggagaaaacccggggcaagagagcaaacggcgcggggaattctcaacccagtgtaaaaaaaagcgcccgggggggaaacagaggtgttgtgtcagagaaatgtccgaggagggagaactacaagaagagggactcaaccgggaggtcctacgcaccgagggagtgcacaaagaggcgcccagagtaaattacg

SEQ ID NO: 7669 - DNA, 2970 bp, Homo sapiens
atcatccgggggcgggcgcccctgccctgcgggtgacttcgacccctggctagagggtaggcggcgtggagcagcgcgcgcaagcaggccaggggaaggtgggcgcaggtgagggggccgaggtgtgcgcaggactttagccggttgagaaggatcaagcaggcatttggagcacaggtgtctagaaacttttaaggggccggttcaagaaggaaaagttcccttctgctgtgaaactatttggcaagaggctggagggcccaatggctgcaaaatcgcaacccaacattcccaaagccaagagtctagatggcgtcaccaatgacagaaccgcatctcaagggcagtggggccgtgcctgggaggtggactggttttcactggcgagcgtcatcttcctactgctgttcgcccccttcatcgtctactacttcatcatggcttgtgaccagtacagctgcgccctgaccggccctgtggtggacatcgtcaccggacatgctcggctctcggacatctgggccaagactccacctataacgaggaaagccgcccagctctataccttgtgggtcaccttccaggtgcttctgtacacgtctctccctgacttctgccataagtttctacccggctacgtaggaggcatccaggagggggccgtgactcctgcaggggttgtgaacaagtatcagatcaacggcctgcaagcctggctcctcacgcacctgctctggtttgcaaacgctcatctcctgtcctggttctcgcccaccatcatcttcgacaactggatcccactgctgtggtgcgccaacatccttggctatgccgtctccaccttcgccatggtcaagggctacttcttccccaccagcgccagagactgcaaattcacaggcaatttcttttacaactacatgatgggcatcgagtttaaccctcggatcgggaagtggtttgacttcaagctgttcttcaatgggcgccccgggatcgtcgcctggaccctcatcaacctgtccttcgcagcgaagcagcgggagctccacagccatgtgaccaatgccatggtcctggtcaacgtcctgcaggccatctacgtgattgacttcttctggaacgaaacctggtacctgaagaccattgacatctgccatgaccacttcgggtggtacctgggctggggcgactgtgtctggctgccttatctttacacgctgcagggtctgtacttggtgtaccaccccgtgcagctgtccaccccgcacgccgtgggcgtcctgctgctgggcctggtgggctactacatcttccgggtggccaaccaccagaaggacctgttccgccgcacggatgggcgctgcctcatctggggcaggaagcccaaggtcatcgagtgctcctacacatccgccgacgggcagaggcaccacagcaagctgctggtgtcgggcttctggggcgtggcccgccacttcaactacgtcggcgacctgatgggcagcctggcctactgcctggcctgtggcggtggccacctgctgccctacttctacatcatctacatggccatcctgctgacccaccgctgcctccgggacgagcaccgctgcgccagcaagtacggccgggactgggagcgctacaccgccgcagtgccttaccgcctgctgcctggaatcttctaagggcacgccctagggagaagccctgtggggctgtcaagagcgtgttctgccaggtccatgggggctggcatcccagctccaactcgaggagcctcagtttcctcatctgtaaactggagagagcccagcacttggcaggtgtccagtacctaatcacgctctgttccttgcttttgccttcaagggaattccgagtgtccagcactgccgtattgccagcacagacggattttctctaatcagtgtccctggggcaggaggatgacccagtcacctttactagtcctttggagacaatttacctgtattaggagcccaggccacgctacactctgcccacactggtgagcaggaggtcttcccacgccctgtcattaggctgcatttactcttgctaaataaaagtgggagtggggcgtgcgcgttatccatgtattgcctttcagctctagatccccctcccctgcctgctctgcagtcgtgggtggggcccgtgcgccgtttctccttggtagcgtgcacggtgttgaactgggacactggggagaaaggggctttcatgtcgtttccttcctgctcctgctgcacagctgccaggagtgctctgcctggagtctgcagacctcagagaggtcccagcactggctgtggcctttcaggtgtaggcaggtgggctctgcttcccgattccctgtgagcgcccaccctctcgaaagaattttctgcttgccctgtgactgtgcagactctggctcgagcaacccggggaacttcaccctcaggggcctcccacaccttctccagcgaggaggtctcagtcccagcctcgggagggcacctccttttctgtgctttcttccctgaggcattcttcctcatccctagggtgttgtgtagaactctttttaaactctatgctccgagtagagttcatctttatattaaacttcccctgttcaaaaaaaaaaaaaaaaaaaaaaaaaaaaaaaaaaaaaaaaaaaaaaaaaaaaaaaaaaaaaaaaaagtggggggggccaaaaaatcccccggggggggcccattgggcacaccacatttgttgtgcacacaaggggggcccccaaaagaaggggcgcgacataaaacgcgcgagcgcggggcgcgcagttaaaaacaactggtgggcgagtgggaacactcggcggccagcggagggaactgcgggaggaggccaccatatgctgggggggggacacattgtgcggacacacaccaccgcgagatatcgacccccggggga

SEQ ID NO: 7670 - DNA, 3314 bp, Homo sapiens
  misc_feature (792)..(816): n is a, c, g, or t
  misc_feature (2171)..(2203): n is a, c, g, or t
  misc_feature (2285)..(2331): n is a, c, g, or t
  misc_feature (2588)..(2608): n is a, c, g, or t
  misc_feature (3246)..(3273): n is a, c, g, or t
tttgagattttttttttttttttgtggttctcacagagttagactttattagataaggggtttcggctaccctcaaagctctcaggactggggctagggtttaaggaaggcttatttaaatatgggaaataaaatacaaaagggccacacccgatgcaaaagactttgctggctttctggtcagacaagcctagagatgtgtattttcttagggcagtaaaacaaaacgttttcacaaggaggctaaatttctatcctgaagttcataaacatgtggcgctcggttaatgggtaaaaataggacaatgtgtgaggcgggaccgctcctcctcatcctcccaagctcctctcctacccacctcccttccctccaaggaaacgcaaagttgccccgaggaggtgggcctgcctccacatcgcccccagggtcaggtatgttctcagcgtcccctaaaacacttgcccaagatcctgctccttcagggccttgatctctgcagtcagaacagaggggtgtgcacaggggagtttcaggggaggacaggggtggggggttccaaagaatttcagaggaagacattcgcccaccccaatcacaaactataagcagcgttgtacaaacagggagtattcccaccttcaggggctatgctatatgaaagcagccttctcttttaatataaaatcatatcaaccaaataaaacctgccaaagctacatcatttaaaatatgtacagtttcacacacaatattacaactttaaggaaaataaaacatacttttcaatatgnnnnnnnnnnnnnnnnnnnnnnnnnttactttaaaagagagcaacacaggtaaaattcaatgataaacttcacttcttggcagtactatagctggaatgagatctgtggcatgatcagcccaagatggatgcattgagtcttcatagactcattcgacaaaaacacccagaaagaaaggcttttgctaagaacacttcaaaaggtttagaacattgcaatgtaacttgcaccctggcagcacctgtcaccagactgtcagtgcaaaactgaaagaaaaacattaaaaggagatcgtgaaatgatacagtgggagcggggcagtttatgctaaaacaatcacacagaattctagatgagaaggaacatgaataggcttgaccaatttcgtgatcactgagcacagtaaagatcaaatttccaggtggaggtggtagacagggggcgtcaaggggagaaatgtggacctctggaagacgaagtcataagcagagctctgcccgcggaggccagagagcagcttctccggctgcggagttggagcctcggaggaattccacggcagggatagatcacagcatacggaacgggactggttccatccaaagagtgaaccgcaatgcttttggaaagcagtatggaaaaatgggaggagcccagattatggctccagataaactaggttcggattcaggtcccatggctcactgagtgacttggggattttaatgccaactttgtagatgagttgtgggggttaaatgagttaacagtaacaagcaccgagcacagtgcctggtacacagtagttattcagcacgtgttagtgctgtctcccacactgtaccatgtcctctcatttcctggtgaagtgacattaggtaggactgtttgggtgcctgtgcagggcagagccaactcacgcttagggagaactcataccgcctaaatataaaggcaattatatatatatatatatatgtgtgtgtgtgtgtgtgtgtgtgtgtgtgtttatatatatatatttatatatttcaatatataaaggcattttttataaataaaataaaataaaaagaataacacttaaaacagcgttactaataatataaataaagcagtccacaatgagattgtcctaaaggtaaagccattttctcttcctcgtggacagatcccatattcaaactcaatctttaaaagcagttcatgacctaaggctcatgctaatacacctgtttcctaaatcaaaatggctgtctacggacaatgactccccagttttctaaaactccctttgtgacagcattgctgtaacttgattggctaacacagggtatgttttcatattctgtgcgctgggactttgtcctttgctagtnnnnnnnnnnnnnnnnnnnnnnnnnnnnnnnnngagctaactgcatctaagcaacatgaagaataaatccagtatactataggcacggacatctggaatgtagaacttgggtctnnnnnnnnnnnnnnnnnnnnnnnnnnnnnnnnnnnnnnnnnnnnnnnctggaagtaactcttgcatagtgacccagcttaaacaagcacattttcactaacagttctgttataaaatatatagacatacgtaagggaatactgatgcatttatacagaaagttggttaacacagtattgtattctattccactgcgatttctgggaaactaacatttcttcacttctgctggaattgcttgactctatagaaagagaataattttctgtttctttccccaaagggatgcacaatgcacaaaggnnnnnnnnnnnnnnnnnnnnngactcaagctatgaaacacacttacataattattgttttttaatgtgaagagccttccaaaggcagctgcaaatgtccttgtcacgcagaggcagccgtggtcaggagctctgctgaccaacttggctttaggtgcctatttacaagggtgacattctgaaaaaggtatcaggaaatttcaggaaaaaaacccaaaacaaacaaacaaaaaaaaacaaaaaacaaacaaacaaaaaaaaacccttttcttccaaagtaagtcttttctgacactcacccctgcaggccgttgcctatgctggagatgggggatgactagtttcggcgtcatggcaccataagcgtgtccctgtgctaatccaacagactggagagctcccgccaagacaggctccctgcagccctcccctttctttcttctgaaaatgtgtatctttctcttcaagccaccatttaatgtcttattttgttcctactccgagaaacagtcaaaaagagcccatagtggccattttataaattaatgtaattttaaagcagtgggacatgaggcattatttgtctctctggccttggttccttttctgcatactgccgtaattcatcaagaccttacactccaccacgtccataacacnnnnnnnnnnnnnnnnnnnnnnnnnnnncactcgtgcccacgtgcagatacaaagtcaacaggtcacat

SEQ ID NO: 7671 - DNA, 557 bp, Homo sapiens
tcttttttcttttcttttttttttttggtgtgtctggggtgatttctgttggaattctacaagagaatttggcagcaaaccacttattttctcatgcccttcattccctcgtccctccttaagtcactttcccttcgtcccctacagccttacagggcttgacccagcattctgcatgtagaagacactcaatggacaataacagcagcatagacttccttagtgcttcctgcgagccagtgctagttgtatgcacttaacagattttaactcacgcaattctcacactgacccgatgaggtatatcatcatccagttttacagatgggaaattgaggcataaagggggccctcacgaatgaatgaattcaccagttccacctctggtgtctctagaactgcaagctaacaaaccacataaacaacactgggctttgagtcaggctggaataagagagccatgattacattcagcattttcctaattataagaaacattacatatagaaagtgaaaacagaaaatttctcttatcctactatctagagataaatcag

SEQ ID NO: 7672 - DNA, 5152 bp, Homo sapiens
gctggaagccgagaggagaagacagctggttgtgggagagttcccccgcctcagactcctggttttttccaggagacacactgagctgagactcacttttctcttcctgaatttgaaccaccgtttccatcgtctcgtagtccgacgcctggggcgatggatccgtttacggagaaactgctggagcgaacccgtgccaggcgagagaatcttcagagaaaaatggctgagaggcccacagcagctccaaggtctatgactcatgctaagcgagctagacagccactttcagaagcaagtaaccagcagcccttctctggtggtgaagagaaatcttgttcaaaaccatcgccatcaaaaaaacgctgttctgacaacactgaagtagaagtttctaacttggaaaataaacaaccagttgagtcgacatctgcaaaatcttgttctccaagtcctgtgtctcctcaggtgcagccacaagcagcagataccatcagtgattctgttgctgtcccggcatcactgctgggcatgaggagagggctgaactcaagattggaagcaactgcagcctcctcagttaaaacacgtatgcaaaaacttgcagagcaacggcgccgttgggataatgatgatatgacagatgacattcctgaaagctcactcttctcaccaatgccatcagaggaaaaggctgcttcccctcccaaacctctgctttcaaatgcctcggcaactccagttggcagaaggggccgtctggccaatcttgccgcaactatttgctcctgggaagatgatgtaaatcactcatttgcaaaacaaaacagtgtacaagaacagcctggtaccgcttgtttatccaaattttcctctgcaagtggagcatctgctaggatcaatagcagcagtgttaagcaggaagctacattctgttcccaaagggatggcgatgcctctttgaataaagccctgtcctcaagtgctgatgatgcgtctttggttaatgcctcaatttccagctctgtgaaagctacttcttctccagtgaaatctactacatctatcactgatgctaaaagttgtgagggacaaaatcctgagctacttccaaaaactcctattagtcctctgaaaacgggggtatcgaaaccaattgtgaagtcaactttatcccagacagttccatccaagggagaattaagtagagaaatttgtctgcaatctcaatctaaagacaaatctacgacaccaggaggaacaggaattaagcctttcctggaacgctttggagagcgttgtcaagaacatagcaaagaaagtccagctcgtagcacaccccacagaacccccattattactccaaatacaaaggccatccaagaaagattattcaagcaagacacatcttcatctactacccatttagcacaacagctcaagcaggaacgtcaaaaagaactagcatgtcttcgtggccgatttgacaagggcaatatatggagtgcagaaaaaggcggaaactcaaaaagcaaacaactagaaaccaaacaggaaactcactgtcagagcactcccctcaaaaaacaccaaggtgtttcaaaaactcagtcacttccagtaacagaaaaggtgaccgaaaaccagataccagccaaaaattccagtacagaacctaaaggtttcactgaatgcgaaatgacgaaatctagccctttgaaaataacattgtttttagaagaggacaaatccttaaaagtaacatcagacccaaaggttgagcagaaaattgaagtgatacgtgaaattgagatgagtgtggatgatgatgatatcaatagttcgaaagtaattaatgacctcttcagtgatgtcctagaggaaggtgaactagatatggagaagagccaagaggagatggatcaagcattagcagaaagcagcgaagaacaggaagatgcactgaatatctcctcaatgtctttacttgcaccattggcacaaacagttggtgtggtaagtccagagagtttagtgtccacacctagactggaattgaaagacaccagcagaagtgatgaaagtccaaaaccaggaaaattccaaagaactcgtgtccctcgagctgaatctggtgatagccttggttctgaagatcgtgatcttctttacagcattgatgcatatagatctcaaagattcaaagaaacagaacgtccatcaataaagcaggtgattgttcggaaggaagatgttacttcaaaactggatgaaaaaaataatgcctttccttgtcaagttaatatcaaacagaaaatgcaggaactcaataacgaaataaatatgcaacagacagtgatctatcaagctagccaggctcttaactgctgtgttgatgaagaacatggaaaagggtccctagaagaagctgaagcagaaagacttcttctaattgcaactgggaagagaacacttttgattgatgaattgaataaattgaagaacgaaggacctcagaggaagaataaggctagtccccaaagtgaatttatgccatccaaaggatcagttactttgtcagaaatccgcttgcctctaaaagcagattttgtctgcagtacggttcagaaaccagatgcagcaaattactattacttaattatactaaaagcaggagctgaaaatatggtagccacaccattagcaagtacttcaaactctcttaacggtgatgctctgacattcactactacatttactctgcaagatgtatccaatgactttgaaataaatattgaagtttacagcttggtgcaaaagaaagatccctcaggccttgataagaagaaaaaaacatccaagtccaaggctattactccaaagcgactcctcacatctataaccacaaaaagcaacattcattcttcagtcatggccagtccaggaggtcttagtgctgtgcgaaccagcaacttcgcccttgttggatcttacacattatcattgtcttcagtaggaaatactaagtttgttctggacaaggtcccctttttatcttctttggaaggtcatatttatttaaaaataaaatgtcaagtgaattccagtgttgaagaaagaggttttctaaccatatttgaagatgttagtggttttggtgcctggcatcgaagatggtgtgttctttctggaaactgtatatcttattggacttatccagatgatgagaaacgcaagaatcccataggaaggataaatctggctaattgtaccagtcgtcagatagaaccagccaacagagaattttgtgcaagacgcaacacttttgaattaattactgtccgaccacaaagagaagatgaccgagagactcttgtcagccaatgcagggacacactctgtgttaccaagaactggctgtctgcagatactaaagaagagcgggatctctggatgcaaaaactcaatcaagttcttgttgatattcgcctctggcaacctgatgcttgctacaaacctattggaaagccttaaaccgggaaatttccatgctatctagaggtttttgatgtcatcttaagaaacacacttaagagcatcagatttactgattgcattttatgctttaagtacgaaagggtttgtgccaatattcactacgtattatgcagtatttatatcttttgtatgtaaaactttaactgatttctgtcattcatcaatgagtagaagtaaatacattatagttgattttgctaaatcttaatttaaaagcctcattttcctagaaatctaattattcagttattcatgacaatatttttttaaaagtaagaaattctgagttgtcttcttggagctgtaggtcttgaagcagcaacgtctttcaggggttggagacagaaacccattctccaatctcagtagttttttcgaaaggctgtgatcatttattgatcgtgatatgacttgttactagggtactgaaaaaaatgtctaaggcctttacagaaacatttttagtaatgaggatgagaactttttcaaatagcaaatatatattggcttaaagcatgaggctgtcttcagaaaagtgatgtggacataggaggcaatgtgtgagacttgggggttcaatattttatatagaagagttaataagcacatggtttacatttactcagctactatatatgcagtgtggtgcacattttcacagaattctggcttcattaagatcattatttttgctgcgtagcttacagacttagcatattagttttttctactcctacaagtgtaaattgaaaaatctttatattaaaaaagtaaactgttatgaagctgctatgtactaataatactttgcttgccaaagtgtttgggttttgttgttgtttgtttgtttgtttgtttttggttcatgaacaacagtgtctagaaacccattttgaaagtggaaaattattaagtcacctatcacctttaaacgcctttttttaaaattataaaatattgtaaagcagggtctcaacttttaaatacactttgaacttcttctctgaattattaaagttctttatgacctcatttataaacactaaattctgtcacctcctgtcattttattttttattcattcaaatgtattttttcttgtgcatattataaaaatatattttatgagctcttactcaaataaatacctgtaaatgtctaaaggaaaaaaaaaaaaaacaaccaacaaaaaaaaaaaacaacaaaacaaaacaaaaaaaaaaaaaaaaaaacaaaaaaaaaaggggggggccaaaaaaattcccccgggggccccatttggcccccttttttgtcacaaagaggctccactataagagacctctccttaaaaaaagacagaacgtcctgccatcatattataaacaacgtcgctatcagaggaaaaaaactctacctactgtaacaatctttgggaaaaaagcaccccacatttttctaagagagacacaaaatggggagacacacccatcagaaagattaacacatcactcagtgaaaataccaacattaagagattatagtgtataaaccactgtgtatttactccgccagaaacttttgcaagacgaattatcgaaaatttaacagggat

SEQ ID NO: 7673 - DNA, 4128 bp, Homo sapiens
  misc_feature (3741)..(3755): n is a, c, g, or t
agcggccggggccacgatggagcgcgacggctgcgcggggggcgggagccgcggcggcgagggcgggcgcgctccccgggagggcccggcggggaacggccgcgatcggggccgcagccacgctgccgaggcgcccggggacccgcaggcggccgcgtccttgctggcccctatggacgtgggggaggagccgctggagaaggcggcgcgcgcccgcactgccaaggaccccaacacctataaagtactctcgctggtattgtcagtatgtgtgttaacaacaatacttggttgtatatttgggttgaaaccaagctgtgccaaagaagttaaaagttgcaaaggtcgctgtttcgagagaacatttgggaactgtcgctgtgatgctgcctgtgttgagcttggaaactgctgtttagattaccaggagacgtgcatagaaccagaacatatatggacttgcaacaaattcaggtgtggtgagaaaaggttgaccagaagcctctgtgcctgttcagatgactgcaaggacaagggcgactgctgcatcaactacagttctgtgtgtcaaggtgagaaaagttgggtagaagaaccatgtgagagcattaatgagccacagtgcccagcagggtttgaaacgcctcctaccctcttattttctttggatggattcagggcagaatatttacacacttggggtggacttcttcctgttattagcaaactaaaaaaatgtggaacatatactaaaaacatgagaccggtatatccaacaaaaactttccccaatcactacagcattgtcaccggattgtatccagaatctcatggcataatcgacaataaaatgtatgatcccaaaatgaatgcttccttttcacttaaaagtaaagagaaatttaatcctgagtggtacaaaggagaaccaatttgggtcacagctaagtatcaaggcctcaagtctggcacatttttctggccaggatcagatgtggaaattaacggaattttcccagacatctataaaatgtataatggttcagtaccatttgaagaaaggattttagctgttcttcagtggctacagcttcctaaagatgaaagaccacacttttacactctgtatttagaagaaccagattcttcaggtcattcatatggaccagtcagcagtgaagtcatcaaagccttgcagagggttgatggtatggttggtatgctgatggatggtctgaaagagctgaacttgcacagatgcctgaacctcatccttatttcagatcatggcatggaacaaggcagttgtaagaaatacatatatctgaataaatatttgggggatgttaaaaatattaaagttatctatggacctgcagctcgattgagaccctctgatgtcccagataaatactattcatttaactatgaaggcattgcccgaaatctttcttgccgggaaccaaaccagcacttcaaaccttacctgaaacatttcttacctaagcgtttgcactttgctaagagtgatagaattgagcccttgacattctatttggaccctcagtggcaacttgcattgaatccctcagaaaggaaatattgtggaagtggatttcatggctctgacaatgtattttcaaatatgcaagccctctttgttggctatggacctggattcaagcatggcattgaggctgacacctttgaaaacattgaagtctataacttaatgtgtgatttactgaatttgacaccggctcctaataacggaactcatggaagtcttaaccaccttctaaagaatcctgtttatacgccaaagcatcccaaagaagtgcaccccctggtacagtgccccttcacaagaaaccccagagataaccttggctgctcatgtaacccttcgattttgccgattgaggattttcaaacacagttcaatctgactgtggcagaagagaagattattaagcatgaaactttaccctatggaagacctagagttctccagaaggaaaacaccatctgtcttctttcccagcaccagtttatgagtggatacagccaagacatcttaatgcccctttggacatcctataccgtggacagaaatgacagtttctctacggaagacttctccaactgtctgtaccaggactttagaattcctcttagtcctgtccataaatgttcattttataaaaataacaccaaagtgagttacgggttcctctccccaccacaactaaataaaaattcaagtggaatatattctgaagctttgcttactacaaatatagtgccaatgtaccagagttttcaagttatatggcgctactttcatgacaccctactgcgaaagtatgctgaagaaagaaatggtgtcaatgtcgtcagtggtcctgtgtttgactttgattatgatggacgttgtgattccttagagaatctgaggcaaaaaagaagagtcatccgtaaccaagaaattttgattccaactcacttctttattgtgctaacaagctgtaaagatacatctcagacgcctttgcactgtgaaaacctagacaccttagctttcattttgcctcacaggactgataacagcgagagctgtgtgcatgggaagcatgactcctcatgggttgaagaattgttaatgttacacagagcacggatcacagatgttgagcacatcactggactcagcttctatcaacaaaggaaaagagcccagtttcagacatttttaaagttgaaaacacatttgccaacctttagccaagaagactgatatgttttttatccccaaacaccatgaatctttttgagagaaccttatattttatatagtcctctagctacactattgcattgttcagaaactgtcgaccagagttagaacggagccctcggtgatgcggacatctcagggaaacttgcgtactcagcacagcagtggagagtgttcctgttgaatcttgcacatatttgaatgtgtaagcattgtatacattgatcaagttcgggggaataaagacagaccacacctaaaactgcctttctgcttctcttaaaggagaagtagctgtgaacattgtctggataccagatatttgaatctttcttactattggtaataaaccttgatggcattgggcaaacagtagacttatagtagggttggggtagcccatgttatgtgactatctttatgagaattttaaagtggttctggatatcttttaacttggagtttcatttcttttcattgtaatcaaaaaaaaaattaacagaagccaaaatacttctgagaccttgtttcaatctttgctgtatatcccctcaaaatccaagttattaatcttatgtgttttctttttaattttttgattggatttctttagatttaatggttcaaatgagttcaactttgagggacgatctttgaatatacttacctattataaaatcttactttgtatttgtatttaaaaaagaaaaatattcctatcctgctcactggtaattaacataggtttaaaatggcttcaaatgtggccctatagacggttaaaattgtaccttatcttggcaaaacttcagagcaccagtcagtgcatgcaaggtgccattttttattgagatgcttagaatgtttctttctgtgcacaagacttaccctaccagcagcagagccattctctgttgagtggttcattttgaagttccacagannnnnnnnnnnnnnncaccaatcacctcacatcttcttggtggacatgataaatgacacaatgaacttgatttctttactaccttgctgtagctttttatccctacctgtgaaccttcaaagactgcattaacttttaggctacataggtccaatttaggtataatatcagtacaccaaagatttttatatggccttcgtgtgaccattctttaacggcctaagggcagtctgcaaagacttttggaaaatacaatttacaactcaaaattatttaataatttaggaagtttcttttttttttttttttcagtcctgcagtttcctgaagctctgtatatgatatttttttcagcctgcttctctctgttgttcagattaggtaattt

SEQ ID NO: 7674 - DNA, 5482 bp, Homo sapiens
  misc_feature (2378)..(2404): n is a, c, g, or t
ggcgtgtccgcagcagccgcagctcgggggcggtgcctgccttgcagcctcccctcggcgatcgcgcagccccatctttgtccggcctccgcgctttgttctcggcgcccgggccttggccagcctggccagccgccgagcagcccccacgccgcgctggcgtcgtcctcgcctccctcgccgccgccccccgcgcgcggccgggccttgccccccatggtgtcccggccagagcccgagggcgaggccatggacgccgagctggcggtagcgccgccgggctgctcgcacctgggcagcttcaaggtggacaactggaagcagaacctgcgggccatctaccagtgcttcgtgtggagcggcacggctgaggcccgcaagcgcaaggccaagtcctgtatctgccatgtctgtggcgtccacctcaacaggctgcattcctgcctctactgtgtcttcttcggctgtttcacaaagaagcatattcacgagcatgcgaaggcgaagcggcacaacctggccattgatctgatgtatggaggcatctactgttttctgtgccaggactacatctatgacaaagacatggaaataatcgccaaggaggagcagcgaaaagcttggaaaatgcaaggcgttggagagaagttttcaacttgggaaccaaccaaacgggagcttgaactgctgaagcacaacccgaaaaggagaaagatcacctcgaactgcaccataggtctgcgtgggctgatcaaccttgggaacacatgcttcatgaactgcatcgtgcaggccctgacccacacgccacttctgcgggacttcttcctgtctgacaggcaccgctgtgagatgcagagccccagctcctgtctggtctgtgagatgtcctcactgtttcaggagttttactctggacaccggtcccctcacatcccgtataagttgctgcacctggtgtggacccacgcgaggcacctagcaggctacgagcagcaggacgcccacgagttcctcatcgcggccctggacgtgctccaccgacactgcaaaggtgatgacaatgggaagaaggccaacaaccccaaccactgcaactgcatcatagaccagatcttcacaggcgggttgcagtcagacgtcacctgccaagtctgccatggagtctccaccaccatcgaccccttctgggacatcagcttggatctccccggctcttccaccccattctggcccctgagcccagggagcgagggcaacgtggtaaacggggaaagccacgtgtcgggaaccaccacgctcacggactgcctgcgacgattcaccagaccagagcacttgggcagcagcgccaagatcaagtgcagcggttgccatagctaccaggagtccacaaagcagctcactatgaagaaactgcccatcgtagcctgttttcatctcaaacgatttgaacactcagccaagctgcggcggaagatcaccacgtatgtgtccttccccctggagctggacatgacccctttcatggcctccagcaaagagagcaggatgaatggacagtaccagcagcccacggacagtctcaacaatgacaacaagtattccctgtttgctgttgttaaccatcaagggaccttggagagtggccactacaccagctttatccggcagcacaaagaccagtggttcaagtgtgacgatgccatcatcaccaaggccagcatcaaggacgtcctggacagcgaagggtacttgctgttctatcacaaacagttcctggaatacgagtagccttatctgcagctggtcagaaaaacaaaggcaatgcattggcaagcctcacaaagtgatcctccctggcccccccctcccccaagtctcccgccgcctccccggcctggtgacaccacctcccatgcagatgtggcccctctgcacctgggacccatcgggtcgggatggaccacacggacggggaggctcctggagctgctttgaagatggatgagatgaggggtgtgctctgggtgggaggagcagcgtacacccgtcaccagaacatctcttgtgtcatgacatgggggtgcaacgggggcctcacagcacagagtgaccgctgcctggcgttccccagcactcggtgtggaaaggcccctacctgctgtaagattatgggtccatgaaagcagtaagctggacacagaggtgtagtgtgcgggacagagggccttgcagatgcctttctgttggtgttttagtgttaaaatacggagagtatggaactcttcacctccattttctcagcggctgtgaagcagcctcctagcttcggaagtacggacactacgtcgcgttttcaagcgtgtctgttctgnnnnnnnnnnnnnnnnnnnnnnnnnnnggaagcatctcgcggttttctagaaacaggcattttcttatccctctcccgctcctttttccacaaaggtgaatttcataaatgtaatactagtaaagtgaatgaattactgagtttatacagaaatttaggtaacttctcctttagtctcaagagcgagtcttgctttttaatgggtgccgtttatgttgctgcccgccctgtgtgcctggctcctctgggtgccttggtgtctgctggtggctggcagtgggcgcagcggaggagagttgtgctgcagctcatacggtgtgtctgtcatctcagtctggagtaaatgcagtgtctgccggtgtctgatgggttctgtccctcgtattttctttgccttctatcccattgcctggctaccgctgcctggcagccaagggtgttggtcgcgaagctggagtggcctctggtggagcctgcatcttgtctcgtctgcctctgctttacatttggtgtactttcgggcgtggtggcagtaaaatgacaccgtgattgagcttgtcagcagagctgaaagagaaagtagaaggatgtgcattgtttcttgtaagatatcttgcatgtatctgtgtattcaaattcaaacagagatggtttgtccatttgtccactgagaaattataaactagggacaagggggaggaaaagtactgaaatacagtttatgaagcaagtgtgtctcgggctgtgcttgtcccaggagccccagcagcatctgaactgaggcttcttcagtcctgcaggaacaggatcatctgtctcagcggtgggcagatgttttcatagacagccagggagtaaacactgttggctctgtgggctgtatggtctctgccataaatagtacagagatgtggctgtgtctagtacaacttttagacacagaaatctgaatgacatatattgttctgtgtcaagaaacttagattttttttttaactatttaaaaacgtgaaacctattcttagctcacaggccatggagaagctggtggggaccagacccagctccttagctggctgggctggggagggggcagtgacagtggcagctgctactcactgctcagtgtggaaaacacaggacttggcaatcacagcccgcagaaccatcatgtgtggcagaagcctgagggatgcggtttcttgcccacgtgctctgttcattttctgttgtttttctgcacttaaagaattcacatggaagcatgttttataaaatgaattaccagagaaacagagatgggccgagattctcagaaatggtcccatgtgaccaagttctgctgtttgggtgacagtgctttgaagatctcctttgaggatgtgcagtcttttttttttttttttttgagatggagtttgttgcccaggctggagtgagtggcacagtctcggctcactgcaacctccacctcctgggttcaagcagttctcgtgccgcagcctcccaagtagctgggactacaggcatgcgccaccacgccaggctaatttttgtatttttagtagagatggggtttcaccatgtctcaaactcctgacctcaggcgatccacccacctcagcgtcccaaagtgctgggattataggcgtgagccaccgcacctggcctatgagtggtcttttaattaggaacaaatctaatggaaaggagagttgactgaagttggcccacaggattgtgagctgggcagtgccttcatgaaggcttgccaccttgggacgccccagtttactggggtgtcttgcggagtgcagaaggctttctggcagctgcctgggtttggccagaccctgcctcccctcccgccggccaacccctagtccccttcctgtctccacttgcattcaggggtggctgctgttctgagaacattagaactgggaagagagatggagtcacatggatttttggtgggcattattctgaactttcgtatccaagttagtcccccttattccactgtggcattgccgttctaagcagttacctgatgcctgctgctgaagagctgctcacaggaggcggcggcggccctggcactgccccttgcattaggtcttgtgtttgatgtgttcttgtgaatttactttgtcagaacaaaatatttacgcgttgggttcaggaatttcttttagctccccatctggctgtgaaattcaggaaacctcccgttgcctagtaatcaccccatgtaggtgtacattgtgacaaagtgcatctgaccactaaggggcccccttggtgaccccagcacattcacagcagtgttaaaatggcctgcattttggagatgctggctggcctttcagtgcctcccaggaagacacatggcctttccctcttcagatgcctgaagggagtgctttgaggcaggtgatgtgctgggagtgtgggcggcctccctctggccccggggccctctgtggaccttggctccctccgtggacctgggcttcgtggtgagcactgcagcctccctgggcattccctccagcgccagcaccactgcaacatatagacctgagtgctattgtattttggcttggtgtgtatgctcttcattgtgtaaaattgctgttcttttgacaatttaagtgattgttttgtttactgtaagtttgaaaataaaaatgaagaaaaaaattccaatgactgtgctgtggttggagactttatttaccaagatgtttactcttcctttccccttccattttgaggagctgtgtcactcctcctcccccccagtgctttgtagtctctcctatgtcataataaagctacattttctctgaaaaaaaaaaaaaaaaaaaaaaaaaaaaaaaatatgtcggtggcggaaaaagaggggatgaaaagggccacatggccataacctggttcccggacccagcctttcttggttaaaagggggtagaatttgccggggtctcccccaaaaggggagccgcatttattttgcgaaaaaccccggtttaaccgtggctttaaagaaatccggggtgggtaaaccccgggaattttaaccccccccttatggggggg

SEQ ID NO: 7675 - DNA, 1455 bp, Homo sapiens
cacttttgttccttctgtctgctttctgatgctaatattatttgaacatagatttttctcagtaatgatttctagttggcttttcctttccttttgtcattactcagggaatgataaagatattgttgatttgagacagtgcagtgtagtgttatagacacacctgggttcaggtcctactctcttatttactagctggttggccatggtcaagttacctaatttccctaagcatcagtttccctatctgtacaaattattgagtaataatagtatctcttataggattggtataaagacttaaaaagttaatgtcatgtaaaatgctttagcataatacctgactcagagtaaaggcttaataaaccctagctgatcttactgtcagaatcaataatattactatttgtaatataattaccagacttaacaaatgggagaagtattaaccatctgcaggaataagtaccagagcctgcatcaaaatagtttatattcaacatgaagtctttaaattggcaaaagcactcagtttaatatatacctgttaagaaaattttaagagacagtcatggtttttagctggatactctgggaaaccaaataaagcagataattgtacagtatgataatcaaaaaaaggatgtctttataaatagcttgaaatagttccccagatgcaacttgaataaaggaaataaatagccgacttgctctaacttgaggttagagcagaattccttagtctgattcactggatgctggaaacccctgccccacattttcccactccctcttggttagaaaaatttacattggtttagcattatactcttgaggctattttctttcaaaaaaaaaaaaaacttttaaaaaattttagattttaggtgtgtaatctttgggcagtttccagggctttaaaaatggggttcaaaatttctggatgggattatttagcagaagttcttagaagtttgtccttgtgcactggaacacaggatatttttggttcctgtatttgggtgggcaacacaaatgtaacagtaccagctttagctgtgtttgtaacatgtggccacagtgagtctttgataactgaaggatacgtgttctccattgttctctgtatcctcaaagtaaaaataggggaagtgttcagattaatccttactgtgttctaggactgtgttgtcatgattaaaatttctttatattaattggtacatgcaagattaaccctttcttttgaaacactaaggggccccttccaaagagtcaacttttggggcccttggtgggaatctgaagttctttaaggggccttaatagctcgacaacgggaggagctattacttggaccaagtggggctcgaatggagacaccgggggcaaggtgtggcaaaaaagtggacatgtgaagcctgttcacagtggtataggtcaaagcccggg

SEQ ID NO: 7676 - DNA, 6816 bp, Homo sapiens
  misc_feature (1919)..(1989): n is a, c, g, or t
  misc_feature (3223)..(3247): n is a, c, g, or t
  misc_feature (6189)..(6189): n is a, c, g, or t
  misc_feature (6209)..(6209): n is a, c, g, or t
  misc_feature (6215)..(6221): n is a, c, g, or t
  misc_feature (6223)..(6230): n is a, c, g, or t
  misc_feature (6234)..(6239): n is a, c, g, or t
  misc_feature (6241)..(6244): n is a, c, g, or t
  misc_feature (6248)..(6248): n is a, c, g, or t
  misc_feature (6250)..(6250): n is a, c, g, or t
  misc_feature (6254)..(6258): n is a, c, g, or t
  misc_feature (6261)..(6261): n is a, c, g, or t
  misc_feature (6276)..(6276): n is a, c, g, or t
  misc_feature (6278)..(6281): n is a, c, g, or t
  misc_feature (6291)..(6300): n is a, c, g, or t
  misc_feature (6305)..(6305): n is a, c, g, or t
  misc_feature (6307)..(6307): n is a, c, g, or t
  misc_feature (6322)..(6322): n is a, c, g, or t
  misc_feature (6324)..(6327): n is a, c, g, or t
  misc_feature (6338)..(6339): n is a, c, g, or t
  misc_feature (6341)..(6342): n is a, c, g, or t
  misc_feature (6351)..(6351): n is a, c, g, or t
  misc_feature (6386)..(6386): n is a, c, g, or t
  misc_feature (6388)..(6388): n is a, c, g, or t
  misc_feature (6413)..(6414): n is a, c, g, or t
  misc_feature (6416)..(6416): n is a, c, g, or t
  misc_feature (6418)..(6418): n is a, c, g, or t
  misc_feature (6434)..(6435): n is a, c, g, or t
  misc_feature (6438)..(6438): n is a, c, g, or t
  misc_feature (6463)..(6463): n is a, c, g, or t
  misc_feature (6465)..(6465): n is a, c, g, or t
  misc_feature (6470)..(6470): n is a, c, g, or t
  misc_feature (6483)..(6483): n is a, c, g, or t
  misc_feature (6485)..(6485): n is a, c, g, or t
  misc_feature (6494)..(6494): n is a, c, g, or t
  misc_feature (6517)..(6517): n is a, c, g, or t
  misc_feature (6534)..(6536): n is a, c, g, or t
  misc_feature (6557)..(6557): n is a, c, g, or t
  misc_feature (6562)..(6563): n is a, c, g, or t
  misc_feature (6607)..(6607): n is a, c, g, or t
  misc_feature (6619)..(6620): n is a, c, g, or t
  misc_feature (6642)..(6642): n is a, c, g, or t
  misc_feature (6644)..(6646): n is a, c, g, or t
  misc_feature (6660)..(6660): n is a, c, g, or t
  misc_feature (6663)..(6663): n is a, c, g, or t
  misc_feature (6666)..(6674): n is a, c, g, or t
  misc_feature (6678)..(6678): n is a, c, g, or t
  misc_feature (6681)..(6681): n is a, c, g, or t
  misc_feature (6686)..(6686): n is a, c, g, or t
  misc_feature (6688)..(6689): n is a, c, g, or t
  misc_feature (6694)..(6694): n is a, c, g, or t
  misc_feature (6696)..(6697): n is a, c, g, or t
  misc_feature (6709)..(6709): n is a, c, g, or t
  misc_feature (6723)..(6723): n is a, c, g, or t
  misc_feature (6725)..(6725): n is a, c, g, or t
  misc_feature (6727)..(6729): n is a, c, g, or t
  misc_feature (6746)..(6746): n is a, c, g, or t
  misc_feature (6756)..(6757): n is a, c, g, or t
  misc_feature (6784)..(6785): n is a, c, g, or t
  misc_feature (6787)..(6787): n is a, c, g, or t
  misc_feature (6801)..(6801): n is a, c, g, or t
cgttggccgggcccgggggaggaggggaatctcccgccatttttcaataatttcctccggtgctgctgaggaggagtcgtgactgccggccgccgggacccgaagcggaggtcggcggggggctgctgggaggcgcggcggtgtgcgcgggagctctgcgccgtggcgttccgctccatgactgtcgcgcggccgcgccggcggtgagggagccggagttcgcgccgccctctcacccctcccttcccccaccccacccccgggcgcctggcgctcgctccgggccgcggggcctagtgctgcgccgcggggccggccccagcagccgccagtccccaccgccgccgccgcgatggcgccgctcctgggccgcaagcccttcccgctggtgaagccgttgcccggagaggagccgctcttcaccatcccgcacactcaggaggccttccgcacccgggaagagtatgaagcccgcttggaaaggtacagtgagcgcatttggacgtgcaagagtactggaagcagtcagctaacacacaaggaagcctgggaggaagaacaggaagttgctgagcttttgaaggaggagtttcctgcctggtatgagaagcttgttctggaaatggttcaccataacacagcctccttagagaagttagtagatactgcttggttggagatcatgaccaaatatgctgtgggagaagagtgtgacttcgaggttgggaaggagaaaatgctcaaggtgaagattgtgaagattcatcctttggagaaagtggatgaagaggccactgagaagaaatctgatggtgcctgtgattctccatcaagtgacaaagagaactccagtcagattgctcaggaccatcagaagaaggagacagttgtgaaagaggatgaaggaaggagagagagtattaatgacagagcacgtagatcgccacgaaaacttcctacttcattaaaaaaaggagaaaggaaatgggctcctccaaaatttctgcctcacaaatatgatgtgaaactacaaaatgaagataagatcatcagtaacgtgccagcagacagcttgattcgtacagagcgcccaccaaataaggagatagttcgatactttatacggcataatgcattacgagctggtactggtgaaaatgcaccttgggtcgtagaagatgaattggtgaagaaatactctctgcccagcaagttcagtgactttttacttgatccatacaagtatatgactctcaacccttctactaagaggaagaatactggatccccagacaggaagccctcaaagaaatccaagacagacaactcttctcttagttcaccactaaatcctaagttatggtgtcacgtacacttgaagaagtcattgagtggctcgccactcaaagtgaagaactcaaagaattccaaatctcctgaagaacatctagaagaaatgatgaagatgatgtcgcccaataagctgcacactaactttcacattcctaaaaaaggcccacctgccaagaaaccagggaagcacagtgacaagcctttgaaggcaaagggcagaagcaaaggcatcctgaatggacagaaatccacagggaattccaaatctcccaaaaaaggactgaagactcctaaaaccaaaatgaagcagatgactttgttggatatggccaaaggcacgcagaagatgacacgagccccacggaattctgggggtacacctaggacctctagtaaacctcataaacatctgcctcctgcagccctacacctcattgcatactacaaagaaaacaaagacagggaggacaagaggagcgccctgtcctgtgttatctccaaaacagctcgtcttctctctagtgaagatagagctcgtctcccagaagaatgggaagtcttgtgcnnnnnnnnnnnnnnnnnnnnnnnnnnnnnnnnnnnnnnnnnnnnnnnnnnnnnnnnnnnnnnnnnnnnnnnaatatttgaaaaagaaacgggaggagctgaaaaagaagttgaaggaaaaagccaaagaacgaagagagaaagaaatgcttgagagattagaaaaacagaagcggtatgaggaccaagagttaactggcaaaaaccttccagcattcagattggtggatacccctgaagggctgcccaacacgctgtttggggatgtggccatggtggtggaattcttgagctgttattctgggctacttttaccagatgctcagtatcctattactgctgtgtcccttatggaagccttgagtgcagataagggtggctttttataccttaacagggtgttggtcatcctcttacagaccctcctacaagatgagatagcagaagactatggtgaattgggaatgaagctgtcggaaatccccttgactctgcattctgtttcagagctggtgcggctctgcttgcgcagatctgatgttcaggaggaaagcgagggctcagacacagatgacaataaagattcagctgcatttgaggataatgaggtacaagatgagttcctagaaaagctggagacctctgaattttttgagctgacgtcagaggagaagctacagatcttgacagcactgtgccaccggatcctcatgacatactcagtgcaagaccacatggagaccagacagcagatgtctgcagagttgtggaaggaacggcttgctgtgttgaaggaagaaaatgataagaagagagcagagaaacagaaacggaaagaaatggaagccaaaaataaagaaaatggaaaagttgagaatgggttaggcaaaactgataggaaaaaagaaattgtgaagtttgagccccaagtagatacagaagctgaagacatgattagtgctgtgaagagcagaaggttgcttgccattcaagctaagaaggaacgggaaatccaggaaagagaaatgaaagtgaaactggaacgccaagctgaagaagaacgaatacggaagcacaaagcagctgctgagaaagctttccaggaagggattgccaaggccaaactagtcatgcgcaggactcctattggcacagatcgaaaccataatagatactggctcttctcagatgaagttccaggattattcattgaaaaaggctgggtacatgacagcattgactaccgattcaaccatcactgcaaagaccacacagtctctggtgatgaggattactgtcctcgcannnnnnnnnnnnnnnnnnnnnnnnntgcaagcatgaacacacaacatggaacagcaacagaagttgctgtagagacaaccacacccaaacaaggacagaacctatggtttttatgtgatagtcaaaaggagctggatgagttgctaaactgtcttcaccctcagggaataagagaaagtcaacttaaagagagactagagaagaggtaccaggacattattcactctattcatctagcacggaagccaaatttgggtctaaaatcttgtgatggcaaccaggagcttttaaacttccttcgtagtgatctcattgaagttgcaacaaggttacaaaaaggaggacttggatatgtggaagaaacatcagaatttgaagcccgggtcatttcattagagaaattgaaggattttggtgagtgtgtgattgcccttcaggccagtgtcataaagaaatttctccaaggcttcatggctcccaagcaaaagagaagaaaactccaaagtgaagattcagcaaaaactgaggaagtggatgaagagaagaaaatggtagaggaagcaaaggttgcatctgcactggagaaatggaagacagcaatccgggaagctcagactttctccaggatgcacgtgctgcttgggatgcttgatgcctgtatcaagtgggatatgtccgcagaaaatgctaggtgcaaagtttgtcgaaagaaaggtgaggatgacaaattgatcttgtgtgatgagtgtaataaagccttccacctgttttgtctgaggccggccctctatgaagtaccagatggtgagtggcagtgcccagcttgccagcccgctactgccaggcgcaactcccgtggcaggaactatactgaagagtctgcttctgaggacagtgaagatgatgagagtgatgaagaggaggaggaggaagaagaggaggaggaggaagaagattatgaggtggctggtttgcgattgagacctcgaaagaccatccggggcaagcacagcgtcatcccccctgcagcaaggtcaggccggcgcccgggtaagaagccacactctaccaggaggtctcagcccaaggcaccacctgtggatgatgctgaggtggatgagctggtgcttcagaccaagcggagctcccggaggcaaagcctggagctgcagaagtgtgaagagatcctccacaagatcgtgaagtaccgcttcagctggcccttcagggagcctgtgaccagagatgaggccgaggactactatgatgtgatcacgcaccccatggactttcagacagtgcagaacaaatgttcctgtgggagctaccgctctgtgcaggagtttcttactgatatgaagcaagtgtttaccaatgctgaggtttacaactgccgtggcagccatgtgctaagctgcatggtgaagacagaacagtgtctagtggctctgttgcataaacaccttcctggccacccatatgtccgcaggaagcgcaagaagtttcctgataggcttgctgaagatgaaggggacagtgagccagaggccgttggacagtccaggggacgaagacagaagaagtagagaggcagggccgtggtgacagtatcagtgagtgccatacagaattgtgtattcaccagcatcatgaaacagttgtggtcttttgagttgatcttggcagagtaaagggacgtgtcctggagccattcctgaatctccccttctttgtgacagctcctcccacccccccaaaaaataaaaaaaccacaaaaaacaaaaaaacaaaactaaggcacttcacttagagactggagtcctgcttataatcatgcatataacctttactttgatggatctggccagaggggtgttggagcccagcccacccacataccagtcaagctcttaggggagcagaagaaaagcaggaagaatttaaatgtttaattttttttttaaattgacttttctagttattaaaagttgcttgtttcagcagtgatattgtataaagaacatcttgtaagatactcctgacatcttgctttagcacatgtacagtacagtttctatgataatgtgtttgctctaacttccctggcttctccttcagcccatccactctcctctagagcagttgggttggaggctcattgaggcaagcagcaacattggagggggagcagggcagtgctgtgtctgctgcctcccatgcccgttctgacctcagccttggaactcctcaagaacctgaagattccagtggtcagtgtcggtggggggtgggaggagagagcggcagagaagctctgagagccccttcccccacaacaaatctagctctagttgttatatttaggcaaaactttgtagtcttctttcccttttatgatggattttgataaaagtacaaaacagggtttttcttttttatcacctttgaatttggaaattttgagcacccaagctcttctgtacctatttaaagtccaccaaggggactgcagctcctagaacatgagaatcaagcctcttaattttaaactgcggaatgtggcctctgcttcctccgtcctcctgcccaaggacgacgaggattgctccagggctgctgggtagtttaccgtcccttctataggcatggagttggcactgacatcacagcttcataaccccaccaccgccagcttcccctgcctcctacatccagtctgttcttgttcatagtgagaatcctgtgttcccacttcagtgacacctgaattgtttgttgttgttttttttttttattgtcttcaaagaggaagggccccattaaagggtgaacttgtaataaattggaatttcaaataaacctcatgtacttgtgtttataaagaagaaaccaaaaaaaaaaaaaaaaaaaaaaaaaaaaaaaaaaaaaaaaaaaaaaaaaaaaaaaaaaaaaaaaaaaaaaaaaaanaaaaaaaaaaaaaaaaaaanaaaaannnnnnnannnnnnnnaaannnnnnannnnaaananaaannnnnaanaaaaaaaaaaaaaanannnnaaaaaaaaannnnnnnnnnaaaananaaaaaaataaataanannnnaataaaaaaannannaaattttantttttttttttaaaaaaaatattttttataaaaanantttatttaaaaaaaaaattttttanntnanttattattattttttnnggnaaaaaaataaaaaaaaaatattttnanttttntttaaaaaaaatnantttttttanatatttttatttttaaaataaanaaattaaaaataaaaannntatttaaatattttttaaaanaaaannttttttttttaaaaaaaatttataaaaaaaattttttttttttntttttttttttnntatattatttttttttttttantnnnatataaaaaaatanaanatnnnnnnnnnaatnttnaaaantnnttttntnnaatatttttttnattttaaaacaaanantnnnaaaaataaattattatntggaaaattnnaaattttttaaaattatttcttttttnntntttttatatataanaataaaaaattgtgt

SEQ ID NO: 7677 - DNA, 3788 bp, Homo sapiens
  misc_feature (1927)..(1943): n is a, c, g, or t
tcggctagtacgagctgggcgggggagtccgcggcgagcgcagcagcagggccgggtcctgcgcctcgggggtcggcgtccaggctcggagcgcggcacggagacggcggcagcgctggactaggtggcaggccctgcatcatggaaactctttctaatgcaagtggtacttttgccatacgccttttaaagatactgtgtcaagataacccttcgcacaacgtgttctgttctcctgtgagcatctcctctgccctggccatggttctcctaggggcaaagggaaacaccgcaacccagatggcccaggcactgtctttaaacacagaggaagacattcatcgggctttccagtcgcttctcactgaagtgaacaaggctggcacacagtacctgctgagaacggccaacaggctctttggagagaaaacttgtcagttcctctcaacgtttaaggaatcctgtcttcaattctaccatgctgagctgaaggagctttcctttatcagagctgcagaagagtccaggaaacacatcaacacctgggtctcaaaaaagaccgaaggtaaaattgaagagttgttgccgggtagctcaattgatgcagaaaccaggctggttcttgtcaatgccatctacttcaaaggaaagtggaatgaaccgtttgacgaaacatacacaagggaaatgccctttaaaataaaccaggaggagcaaaggccagtgcagatgatgtatcaggaggccacgtttaagctcgcccacgtgggcgaggtgcgcgcgcagctgctggagctgccctacgccaggaaggagctgagcctgctggtgctgctgcctgacgacggcgtggagctcagcacggtggaaaaaagtctcacttttgagaaactcacagcctggaccaagccagactgtatgaagagtactgaggttgaagttctccttccaaaatttaaactacaagaggattatgacatggaatctgtgcttcggcatttgggaattgttgatgccttccaacagggcaaggctgacttgtcggcaatgtcagcggagagagacctgtgtctgtccaagttcgtgcacaagagttttgtggaggaaaataaaaaaaggactcgaggcagcggcagcgtcgagctgctttgtagttgcagagtgctgcatggaatctggccccaggttctgtgctgaccaccctttccttttcttcatcaggcacaacagagccaacagcattctgttctgtggcaggttctcatcgccataaagggtgcacttaccgtgcactcggccatttccctcttcctgtgtccccagatccccactacagctccaagaggatgggcctagaaagccaagtgcaaagatgagggcagattccttacctgtctgccctcatgatttgccagcatgaattcatgatgctccacactcgcttatgctacttaatcagaatcttgagaaaatagaccataatgattccctgttgtattaaaattgcagtccatcaccataggatgcgacaagcaaagttcttctagaattccacatgcaattcactctggcgaccctgtgctttcctgacactgcgaatacattccttaacccgctgcctcagtggtaataaatggtgctagatattgctactattttatagatttcctggtgcttagccttataaaaaaggttgtaaaatgtacatttatattttatcttttttttttttttttttctgagacgcagtctggctctctgtcgcccaggctggagtgcagtggctcgatctctgctcactgcaagctccgcctcccgggttcacgccattctcctgcctcagcctcccgagtagctgggactacaggcgcccgccaccacgcccggctatattttatcttttatctttttctttgacatctaccannnnnnnnnnnnnnnnnaaacactgctttaggcactggggacacaaaggggacagagccatcctcctttgacacctggtcttcagttctgtgcccaacgtatatagttttgacaatgaccaggttggactgtttaatgtctttcaacttaccacgtaatcctcttgtagggatcacatctttctttatgatattgtatttctctacctctaacagtaaaaattccattcaacccttaaagctcacttcaaattcttctttgagaagtttttcctttctccgcaaccagatgtacatatttgaactctctttgtacttggagggcacttctttcgtggtagttcttttatttttattaatctctgtatccttagatagtcctccaacaaccaaaggttgggactctgtcttacatatctgggtgcccctcatagtgcagtaataagtaagttgattatatacgagctatgtaacttatattttttaatggttggatatcactgagtttttttttttaagaatttttttattgaggtaaacttcacataacataaaattaactattttaaagtgagaagttcagtgccacttagtattgttaacaatgttgcataaccaccacctttatttaaagttccaaaaaaaatgttctcctctaaaaggaaaccccatcccattaagcagatactctccattccttccttcctccagcccccagcaaccaccaatctgctttctgtctctatggatttatctattcttgctattttatataaatcgaattgtatgagaccttttgtgtctggcttctttcacttagtacaagtttttgagatttatttacatagtagcatgtatcaacacttcatttttatggccaaataaaattgtattatgtgtttatagcacaaaaaaaaaaaaaaaaaattcattgatggactttgggttgtcttctgacttttggctattgggaatagtgctgctatgaatgtttgtgtacctgtatttgtttgaatgcctattttgcattctcttgggtatatatctaggagtggaactgctgggtcatatgttaattctatgtttagctttttgaggaacagacaaactgttttccacagcagttgaaccattccacattcccaccagcaatgtatgagaattccaatttctgtccacttcctcaccaacacttattattttccttttcctttttttgaaaaaaataagttatggccatcttagtgggtgtgaagtggtatctcattgtgttttttatttgcatttcctatgtaatgagctagaaactaaagtacaaactagatgggacatccagtccctttgatagataatgctgagtaaaaaatgagatgaaagacatttgtttgtttttagaacatgagtgacagtttgttaaaaagctttagaggaggaatgaaaaccaaagtggagttaaacttagaaaaaggggccaagtggaacattttgggatgttaagtggccctagttcagtatcttttttatttatttttggaacaaacgcgcccacactctggtcaccccgggggtggactggtactgggcatgaatcgggggctcacactggaaccctcagctcgcccgcgggatcacagacaaatttcccatggggtaagagcctccccaagagatacgctggacactctaaaggccaccccacccaagtaaccacccccagcagatactctgggcagctccccaagaagaaacagggggggttcccgccacctttgggcccgggtcttggggtctagacacctcgggggctcacaagccgaaccggcagtagcgcaggactcccaacgggggcaccagctaaccacg

SEQ ID NO: 7678 - DNA, 4249 bp, Homo sapiens
  misc_feature (54)..(54): n is a, c, g, or t
  misc_feature (74)..(74): n is a, c, g, or t
  misc_feature (3878)..(3941): n is a, c, g, or t
  misc_feature (4025)..(4153): n is a, c, g, or t
ggatggtctcgatctcttgacttcgtgatctgcctgcctcggcctcctaaagtnctgggattacagtgcgtaanacccgtgcccggctgtccatctcttttcagatgaagagctcaggttctgaggagtgacttgtcaaaagctgttctacctctcagagccagcccttgtcctcctgctagccagagcaaggtaccacctggaagagatgttcagttacatgggatccggggccagagggaaaatatcagtgcttcctgaggttcgggtccagccacccttcttccaccatttctactgagccttcagttgtaccccttcagtccacttggcgaggcatcacgccctctgggcaggctcagtggggaactatgggagcaggtgctgtgtgccacctctggagggggtcactgaggttctgggttgtggggggtgccctgggccagagtgagttgtatgggagttgttgctgaatccccccagagtaccagtcacacaccagtgtgaggggccttgcaagagccactgggcagcacagttgaaggtggcaccttcctgctcagtgctgtgtccagagcagggtttagttttctgtgtctttcggggtgagactggtgtattctataccagcctccctgtgtgtgaacaatgacgagaacaatgtcgtcttgctttcccaaaaaataagacactatctatttctcattagttatacacgttcattataaaacgtaatttaagcaatactgaaatgccaaaaagaaagtaaaattcactccaaaagtaaaattcaccccaaatctcactactcctgtaactatgtctgacagccagctgttgggtcttccatcgtttttaaccttcaggtgagcacacagatccttattttttcttttcttttctttctttttttttttttctgagacgcagtctcctgttgcccaggctggagtgcaatggtgcgatctctgctcaccgtaacttctgcctcccgggttcaagcaagtctcctgcctcagcttcctgagtagctgggattacaggcatgcaccatcacgcctggctaatttttgtatttttagtagagacggggtttcaccaagctggccaagctggtctcgaactcccgacctcaggcaatccgcccacctcagcctcccaaagtgctgggattacaggcgtgagccaccttgcccggactctctttgtattttttctttcttttttttgagacagagtcttgctctgtctcccaggctggagtgcagcgacatgatctcagctcactgcagcctctatctcccaggttccggcagttctcctaccggttagctgggattacaggcatgcgccaccacacccggctaatttttgtatttttagtagagacggggtttcaccatgttggtcaggctggtctccaactcctgacctcaaatgatctgcacacctcggcctcctaaagtgctggaattaccggtgtgagccaccgcgcctggccagatccttattttttcaattgcaatacagcagtatgcaaggcacttactgtatgccaaagcttatgccgagagctggctgccagcagctcctcctgcctcgaggcctttgtccatgtcatcatttcccctttggctgtaacagctgcagttctctcataattttaggtttcatcttaaatgtcacttcttcagaggcttcttgacagcacaagtcagggcccttgttagtttcatcacatccattacctttccttgatcacttgtaccatcatctgtaatttatttttatgtttaatacgggtgtgggatttctgattttttttttgctagactggaagctctcagagggcaggaaccatttgtttccctgccacagagatgttcaataaatattgtcaattgaatgtgcaaataatctcacttaaccacagctatgagggatgctattttatccccattttagagatgactaaactgaggcttagaacaattaacccaaggtcacagtgaattagtggatccatgtgtctgcctccacacagcctgtgtgttcttaattattgatcactaagcaacagctgcctctcacaaactggcaggaaacttcaacttttcccttttatcaatatattgtgaacgccttttcttgctaataaatatacatttgtgtgcgtaatttttaatgatcccatggtattccatcgtgtggatgtaatttacatattcatttccttattctcacttcttcctagttacagcacttctttaagcacttgtaatttttattcctttggataaattcctagaagtttacaacacgaccagctgcaagatggggcagtgaggtgcttgaaggagtgggtgggctgcacttcagaatcccggtggaactttttcaaaaaactcgtgcccggggcccccctctcaggaggccgtcggtgggcctgggcactggcgtggttttcaggtcctcagtggttccgaggtgccagagattgaggaccactggagtaagcgcgaggtcacggcgggtgcaaagcagaagacgtaaaatcctgaccgccctgggacaatctgcaaccttgtcaagcctccgtgcccgcctttgtaaggaggctgggagaagcgggacttggatgacccggactcccgtcccgagcgctggggtccaggtttgactccgctggctttctcaggcgggcagggcgggggtaggcagctgggaagatgacgtaatgtgctcccagccaggcctggaggcggccagcggtcgcaggtggagggtggcctgttaacccttcactcccaggccagtggacggacttgcgtgtggcgcagatccaacggagaaggcagcggctcctttaaacaaggcggagaaggttaagatgatgaccggacggctactccaggcattcgctccgaggccgcggggggagggacctcactatgcaaatctgagctgctgatcgatgacgcgccatcaccccacgcaccgcttcgctcgcccattggctgagatgagcctggtcccattgacaacaaacaggggggcgcgcggcctggaggcggggccgcagggggcgcgggctggggcgggggaatcccgccccgccctttctgtgcggcgcccgggcgcaacgcaaacatggcggcgggtggcacccgtcggtgaggcggtgccgggcgggggttgtcgggtgtcatgggcggtggcgacggcaccgcccccgcgtctccctgagcgggacggcagggggggcttctgcgctgagccgggcgatggacgacagcggcgagctgggtggtctggagaccatggagaccctcacggagctgggcgacgagctgaccctgggagacatcgacggtgagtggtgggtgggtgggagtgcgggggccgcgcggggaggaaggggttacggcggcgcgcccgggtgcgcgtgcgcccaccccccgacagccccggttcgcgcgggaagaaccccgtgcgcacggtgcccccggcggtcctcaacccttccggcgctgcgagcgtgagcccgacccagctgcgccgctccgggaggccgtgggatctggggcgccgcggggccgaaagcggcgcgagggtcgcgggttccagagcgcggggctagggacgtcgcgggggcgtctcagggagcggcctaaggagagcgcgtggccgccgcctccctcgcgcgcccacacgcggtttccgtggtccgctctcccgccgcccgcgaccgcgcgtcgcacctgtcactcccttcctggccgcggggacgtctttgggattcccggggcccagcccccagtctccgcgccccgaatccctgggcttctcaggattgaccgacggccaggtcgccgggnnnnnnnnnnnnnnnnnnnnnnnnnnnnnnnnnnnnnnnnnnnnnnnnnnnnnnnnnnnnnnnnggcggagtgtggacacatctctccgggatggagacccgggcgctcctgctgtcacgcttagagagcttaggcagaaacacaggnnnnnnnnnnnnnnnnnnnnnnnnnnnnnnnnnnnnnnnnnnnnnnnnnnnnnnnnnnnnnnnnnnnnnnnnnnnnnnnnnnnnnnnnnnnnnnnnnnnnnnnnnnnnnnnnnnnnnnnnnnnnnnnnnaagcagaagcagcagaagattctcttttgggggaagagataaatgcagcagctaattgaaaaggatctgtttgccattttcccattttgcttttgt

SEQ ID NO: 7679 - DNA, 3756 bp, Homo sapiens
  misc_feature (3215)..(3215): n is a, c, g, or t
gagcggcacgagggcacgggaaacgcgggcgtaggtgaccggcggctttctcagttttggtggagacgggcgcatgtgggcgctttgctcgctgctgcggtccgcggccggacgcaccatgtcgcagggacgcaccatatcgcaggcacccgcccgccgcgagcggccgcgcaaggacccgctgcggcacctgcgcacgcgagagaagcgcggaccgtcggggtgctccggcggcccaaacaccgtgtacctgcaggtggtggcagcgggtagccgggactcgggcgccgcgctctacgtcttctccgagttcaaccggtatctcttcaactgtggagaaggcgttcagagactcatgcaggagcacaagttaaaggttgctcgcctggacaacatattcctgacacgaatgcactggtctaatgttgggggcttaagtggaatgattcttactttaaaggaaaccgggcttccaaagtgtgtactttctggacctccacaactggaaaaatacctcgaagcaatcaaaatattttctggtccattgaaaggaatagaactggctgtgcggccccactctgccccagaatacgaggatgaaaccatgacagtttaccagatccccatacacagtgaacagaggaggggaaagcaccaaccatggcagagtccagaaaggcctctcagcaggctcagtccagagcgatcttcagactccgagttgaatgaaaatgagccacaccttccacatggtgttagccagagaagaggggtcagggactcttccctggtcgtagctttcatctgtaagcttcacttaaagagaggaaacttcttggtgctcaaagcaaaggagatgggcctcccagttgggacagctgccatcgctcccatcattgctgctgtcaaggacgggaaaagcatcactcatgaaggaagagagattttggctgaagagctgtgtactcctccagatcctggtgctgcttttgtggtggtagaatgtccagatgaaagcttcattcaacccatctgtgagaatgccacctttcagaggtaccaaggaaaggcagatgcccccgtggccttggtggttcacatggccccagcatctgtgcttgtggacagcaggtaccagcagtggatggagaggtttgggcctgacacccagcacttggtcctgaatgagaactgtgcctcagttcacaaccttcgcagccacaagattcaaacccagctcaacctcatccacccggacatcttccccctgctcaccagtttccgctgtaagaaggagggccccaccctcagtgtgcccatggttcagggtgaatgcctcctcaagtaccagctccgtcccaggagggagtggcagagggatgccattattacttgcaatcctgaggaattcatagttgaggcgctgcagcttcccaacttccagcagagcgtgcaggagtacaggaggagtgcgcaggacggcccagccccagcagagaaaagaagtcagtacccagaaatcatcttccttggaacagggtctgccatcccgatgaagattcgaaatgtcagtgccacacttgtcaacataagccccgacacgtctctgctactggactgtggtgagggcacgtttgggcagctgtgccgtcattacggagaccaggtggacagggtcctgggcaccctggctgctgtgtttgtgtcccacctgcacgcagatcaccacacgggcttgccaagtatcttgctgcagagagaacgcgccttggcatctttgggaaagccgcttcaccctttgctggtggttgcccccaaccagctcaaagcctggctccagcagtaccacaaccagtgccaggaggtcctgcaccacatcagtatgattcctgccaaatgccttcaggaaggggctgagatctccagtcctgcagtggaaagattgatcagttcgctgttgcgaacatgtgatttggaagagtttcagacctgtctggtgcggcactgcaagcatgcgtttggctgtgcgctggtgcacacctctggctggaaagtggtctattccggggacaccatgccctgcgaggctctggtccggatggggaaagatgccaccctcctgatacatgaagccaccctggaagatggtttggaagaggaagcagtggaaaagacacacagcacaacgtcccaagccatcagcgtggggatgcggatgaacgcggagttcattatgctgaaccacttcagccagcgctatgccaaggtccccctcttcagccccaacttcagcgagaaagtgggagttgcctttgaccacatgaaggtctgctttggagactttccaacaatgcccaagctgattcccccactgaaagccctgtttgctggcgacatcgaggagatggaggagcgcagggagaagcgggagctgcggcaggtgcgggcggccctcctgtccagggagctggcaggcggcctggaggatggggagcctcagcagaagcgggcccacacagaggagccacaggccaagaaggtcagagcccagtgaagatctgggagaccctgaactcagaaggctgtgtgtcttctgccccacgcacgcacccgtatctgccctccttgctggtagaagctgaagagcacggtcccccaggaggcagctcaggataggtggtatggagctgtgccgaggcttgggctcccacataagcactagtctatagatgcctcttaggactggtgcctggcacagccgcgggccaggaggctgccacacggaagcaagcagatgaactaatttcatttcaaggcagtttttaaagaagtcatggaaacagacggcggcacctttcctctaatccagcaaagtgattccctgcacaccagagacaagcagagtaacaggatcagtgggtctaagtgtccgagacttaacgaaaatagtatttcagctgcaataaagattgagtttgcaaaaaaaaaaaaaaaaaaaaaaaaaaaaaaagatcagggtctgctgtgcaccaccttggagaaggctctctgtgctgtagtgtggcagctgcctggtacccgggtggcttggaagaagtcagctcccgtcgtagtgagcacctctggaacctgtcctcagagagccacccttattcgccaagtctttttgacaactcgagctgtgccagctcacagcagggcgtgctttctctatncatcaatcaatcaaatcaatcagtgagagcctggctgggctggtgtcattggtcagggaaatgcaagtcttctggtggttctgggtaaaagtggagacaatagatttgctgtgttgttgcttccatactgagaggagtgaggatcactttgccctcgaaggttttgagaaatggcacacggggctggtttccattgtcctccttgcgggatttacagacgtggattagtgctcgacaaatggagagcattttccaaggaagtaagtaagtaaagtaagtaagtaagtaagtaagttgaatctagtatttattgtgtatattccctacccaggagaatgtaaaaagaagagctttaaaaactcaaaagacaagcaagcgagagatcagccagggacctggctttacacaggtggtgaccttcaggctccatcccggtgtgcatttgagattgacggccatgtccccgcaggtttattaaagcaagaacagatgccaagctcagggataataaatctattttaataacgttaaaaaaaaaaaa

SEQ ID NO: 7680 - DNA, 2147 bp, Homo sapiens
tcttgcctggagcctgagaaagggaggagagacagaaggaaccggcgacagtggtctcagggccgctccggggggcctcaagaaccggaggcagccccggaggtggtccccgatcccgggctatgctcttggatctgagaagggaaggcggagggcggcggggacaagatgggtggagaatgtcaagcaaggaatgctaggcgggggaggggcgttgctatggcgactggggaggggcggtgtctgttctgaatcgctgtgtgtcacccgggcgctgcccaggaagggcagggctggggtgatgaccatggtaacacccgggtgggagttcgtgacatctccggcgcggagggactcgatgtctatggcaatggtcgcctggtggaagggacggaactagatcccttcgctcgggacgctcacattccaggcccttgtcctgcaggctgccgcgggcggacacgccagaggaggaggccggggaatggccgcggtgtggcagcaagtcttagcagtggacgcgaggtacaacgcgtaccgcacaccaacgtttccacagtttcggacgcagtatatccgccggcgcagccagctgctgcgggagaatgccaaggctgggcaccccccagcgctgcgtcggcagtacctgaggcttcgggggcagctgctgggccagcgctacgggcccctctccgagccaggcagtgctcgtgcctatagcaacagcatcgtccgcagtagccgcactactcttgaccgcatggaggactttgaggatgatcctcgggccctgggggcccgtgggcaccgtcgttctgtcagcagaggctcctaccagctgcaggcgcagatgaaccgtgccgtctatgaggacaggccccctggcagcgtggtgcccacgtcagcagcagaggcaagtcgggccatggccggggacacgtcactgagcgagaactatgcctttgcgggcatgtatcatgtttttgaccagcacgtggatgaggcagtcccaagggtgcgcttcgccaatgatgaccgacaccgcctggcctgctgctcactcgacggcagcatctccctgtgccagctggtgcctgccccacccacagtgcttcgcgtgctacggggccacacccgtggtgtctccgacttcgcctggtccctctccaatgacatcctcgtgtccacctcactggatgccaccatgcgcatctgggcctctgaggatggtcgctgcatccgagagatccctgaccccgatagcgctgaactgctctgctgcaccttccagcctgtcaacaacaacctcactgtggtggggaacgccaagcacaacgtgcatgtcatgaacatctccacaggcaagaaagtgaaggggggctccagcaagctgacaggccgtgtccttgctctgtcctttgatgcccctggccggctgctctgggcgggtgatgaccgtggcagtgtcttctctttcctctttgatatggccacagggaagctgaccaaagccaagcgtttggtggtgcatgaggggagccctgtgaccagcatctcagcccggtcctgggtcagccgcgaggcccgggatccctcactgctcatcaatgcttgcctcaacaagttgctgctctacagggtggtagacaacgaggggaccctgcagctgaagagaagcttccccatcgagcagagctcacatcctgtgcgcagcatcttctgtcccctcatgtccttccgccagggggcctgcgtggtgacgggcagtgaggacatgtgcgtgcacttctttgatgtggagcgggcggccaaggctgctgtcaacaagctgcagggccacagtgcacctgtgcttgatgtcagcttcaactgcgacgagagcctactggcctccagtgacgccagcggcatggtcatcgtctggaggcgggagcagaagtagggtcctgtcggccctgctgctgtcctccatcccacccctcttactccagcctcgtgttgtaaataaagtttcggtggtcatgctgagggccggctcccagctctgccggggacggacagggcagagggcagcgggcagctccaggaacacggtgaaaaaaaaaaaaaaaaaaaaaaaaaaaaaaaaaaaaaaaaaaaaaaaaaaa

SEQ ID NO: 7681 - DNA, 3425 bp, Homo sapiens; identical to SEQ ID NO: 5824

SEQ ID NO: 7682 - DNA, 1050 bp, Homo sapiens
tgtatgacatgagttatcaggaacatgtgaaacaattgactgagaagatggagagggacagggcccagttaatgacagagcaagagaagaccctcgctcttaaacttcaggttgcacaccgatgctccagaagttgtgagggagccatactttacagcgtattccaccgaggataatactaccattgtaaaggcatctcacgggaaaacaacacagctaccatgaaccagcaccatgatctctggatgaaatgctggaagcttctgcagtgtcagctatgagtaaatggatgccaccaccttcacatgttcagtagacaaatactcccctaccccatgaaaagttgcatctttgagctgctcacatctccagccaagcctcacaaaagtcaatctgcagggaagaatctaaatcatatgcctacccatgggaaagtctgagaattagagtatttttgtcttctacttttggaggaagaaactaattacgtgggaaattttcctgtatgtttagtcaaccagtttttccatgcagatgtatggagataaatcttatagtaggaataacctaagacttgagttagtatttttgtgtacatcagatacaacactcttctcatcttttttgtcattatttttcaatgttgttttaatctttccactgttgtttcatgtcatgcactttgttaatattctttaagttattcttagtttttaacaatgatacttaagaaagacttaataggactatagaataggtactccctattccccaaccctgggaacacaatataacatattagttcatttgtatttaagatctatcttgtttacgcctcagtttagttattgctcttacctttcaaacagttaatattttgtatctagttctgtgaaagcaaaaagcaactttattctttcttacaattccccttttacttaatcggaacatttctttcctgtttgttcattagtcactctcagataaatgaatagtctctttttctaaaaaaaaaaataacatttgacctagaaaaaaaaaaaaaaaaaa

SEQ ID NO: 7683 - DNA, 2575 bp, Homo sapiens
gggctgatacggtcggaggttacggatctcggtctggggagctcgctcgctgccaggataggtatgacctatgtctgccttaggctgctgggagatgccattctccagtttcagaagcaggcaggcaaaggtcaagactgtggtattggggtctttggctctgaaggatcctggaaccactgatttggtttattccctccaggtctaaagagaacaagaggtgctagctcttaccaaaacagatggtagagagagttgctggctatttaaaaagctctttcatcttttaattcacctcttcttttcacctctttaaccactcctcaggaacagaacacttctaggactgggggtcttttagctccataagcaagtgagcagatgggacaagttagtcttttctccctagaaacaaaggggatgcccagtggtttccctttgcttcccaacctaaaatttcaagtttaataaaatagcaattagcagaagtgaccaaattgggagataattatcagtcatgaggaaagacacagatttcggtcataaagaatgtaagggctataagtagaaactttctataacctaaatgatgttatagaattatttttgagcaggagcagaaagattaaatatgatcacttcatacttctaaatcagaaataggaagattaaaaccacagaacagtttgtgatttctattgctgtagctaggtatcttactctgtccactcttgttcaagtatctaactcttctggaaaccaaataggctttagaagagattatcctatattcctatcagtataatactaaaatgtaactttttaatctatctcgttttaaagtacgtttgccattctccagagagcaaacataggaatatgactcaggagcctcctaggcttatcatcagccttaaaccggttccccttccaacccacgctttgctttccagtggcaggattactactttgcctcttcgcagcatctactctagcatatgatcatttagacactgggaaagagaacctcaaactaggaggaaaagacagagcctccacttagttttgggaggggatggcagacagtcaaggagatgagcgtcctaaggcatgttgggatagggtcagatgcaccacccatggagaggtttgtcaacacaaagacatggaaggttagaggtttgtcaacaaaaagacatggaaggttaggtttgtcaacacaaagacatggaagattagaggtttgtcaacacaaagacacaggaagaatgggctgcagaagatttagatgttttccatttgggcacattttacttagctggagaactaggtttaaaacagcctgggtaggaaaattagaagcaagctggatgcagtggctcatgcctgtaatcccaacacttttgggaggtccaggcaggaggatcacttgggcccaggaggtcaagcctgcagcgagctgagatcacaccactgcactccagcctggggtgatagaacaagaccctgtctcaaaaaaaaaaaaaacaacaaaaacttagaattgaggagttgtacctccattggcttcctcactccaaaataggtgctgatccttcctattcctattctttgccaccttttgggtgtggtgtcaccagcctgtttagccaagtagctttgggcataggctgcccaatctgagcaaacaccagtgaggctctattgagccaagaccaagtcctcaaagcacctgaaccactgtggccttctcagcctacagcagtgtggtctcttacatggccacaaagggacacacagtgacaaaaggctcggaatgttacaatggtaaaatgagtgatctcaaatccactgacagatataaaataggcttagagaggaaaagctgcctctggtcaagtagatcatggcagcatgaattccaactcacttttttacaactccaacttctatgtttatctttgttactttcacttttttacaacctggccagaggcattttttaaatcaggcccaatatcagtattctttttgtgtgtgccaattttgttatcacatccctatgaagttgaaaaataaagttaattttgaccaaaagaaaaaaaaaaaaaaaaaaaaaaaaaaaaaaaaaaaaaaaaaaaaaaaaaaaaaaaaaaaaaaaaaaaaaaaaaaaaaaaaaaaaaaaaaaaaaaaaaaaaaaaaaaaaaaaaaaaaaaaaaaaaaaaaaaaaaaaaaaaaaaaaaaaaaaaaaaaaggggggggctttttaaaaatctccctgggggggcccatttttacccccacccttttttttttaaaaaggggcccctaagggggggctttttaaaaaagggggcgggcgggcctttttaaaaaccccgggggggggaaaaacccccattttgggggatttttgaaaaaaaaccacttcttctgggggggggcgaaatttgtggacaccccccccccaccagaatattaacgcccccgcggggaaaaaaataaaattttttaagggggaaaaggggggggaaaaaacaaaccttataatttctttgctctctttaaagaaaat

SEQ ID NO: 7684 - DNA, 11640 bp, Homo sapiens
  misc_feature (356)..(401): n is a, c, g, or t
  misc_feature (680)..(735): n is a, c, g, or t
  misc_feature (744)..(794): n is a, c, g, or t
  misc_feature (1382)..(1396): n is a, c, g, or t
  misc_feature (1446)..(1467): n is a, c, g, or t
  misc_feature (2970)..(3007): n is a, c, g, or t
  misc_feature (5242)..(5259): n is a, c, g, or t
  misc_feature (5616)..(5642): n is a, c, g, or t
  misc_feature (6778)..(6809): n is a, c, g, or t
  misc_feature (7319)..(7349): n is a, c, g, or t
  misc_feature (7821)..(7838): n is a, c, g, or t
cacgcgtgggctcggcgggggcccgctcccaggcccgctcccgagcccgttccgctcccgtccgccttcttctcgccttctctccgcgtggctcctccgtcccggcgtctccaaaactgaatgagcgagcggcgcgtagggcggcggcggcggcggcggcggcggcggcggcggcatggagcgcagtggctgggcccggcagactttcctcctagcgctgttgctgggggcgacgctgagggcgcgcgcggcggctggctattacccccgcttttcgcccttctttttcctgtgcacccaccacggggagctggaaggggatggggagcagggcgaggtgctcatttccctgcatnnnnnnnnnnnnnnnnnnnnnnnnnnnnnnnnnnnnnnnnnnnnnntgacaatttcaacaagcaccttttttgacggcttgctggtgacaggactatacacatctacaagtgttcaggcatcacagagcattggaggttccagtgctttcggatttgggatcatgtctgaccaccagtttggtaaccagtttatgtgcagtgtggtagcctctcacgtgagtcacctgcccacaaccaacctcagtttcatctggattgctccacctgcgggcacaggctgtgtgaatttcatggctacagcaacacaccggggccaggttattnnnnnnnnnnnnnnnnnnnnnnnnnnnnnnnnnnnnnnnnnnnnnnnnnnnnnnnntgtgcaccnnnnnnnnnnnnnnnnnnnnnnnnnnnnnnnnnnnnnnnnnnnnnnnnnnnactcctaccaccaactgcaattaaatccaaatatatgggttgaatgtaacaactgtgagactggagaacagtgtggcgcgattatgcatggcaatgccgtcaccttctgtgaaccatatggcccacgagaactgattaccacaggccttaatacaacaacagcttctgtcctccaattttccattgggtcaggttcatgtcgctttagttattcagaccccagcatcatcgtgttatatgccaagaataactctgcggactggattcagctagagaaaattagagccccttccaatgtcagcacaatcatccatatcctctaccttcctgaggacgccaaaggggagaatgtccaatttcagtggaagcaggaaaatcttcgtgtaggtgaagtgtatgaagcctgctgggccttagataacatcttgatcatcaattcagctcacagacaagtcgttttagaagatagtctcgacccagtggacacaggcaactggcttttcttcccaggagctacagttaagcatagctgtcagtcagatgggaactccatttatttccatggaaatgaaggcagcgagttcaatnnnnnnnnnnnnnnngatgtagatctttccacagaagatattcaagagcaatggtcagaagaatnnnnnnnnnnnnnnnnnnnnnnggatgtcttgggagctgtcattggtacagaatgtggaacgatagaatcaggcttatcaatggtcttcctcaaagatggagagaggaaattatgcactccatccatggacactaccggttatgggaacctgaggttttactttgtgatgggaggaatttgtgaccctggaaattctcatgaaaatgacataatcctgtatgcaaaaattgaaggaagaaaagagcatataacactggataccctttcctattcctcatataaggttccgtctttggtttctgtggtcatcaatcctgaacttcagactcctgctaccaaattttgtctcaggcaaaagaaccatcaaggacataataggaatgtctgggctgtagactttttccatgtcttgcctgttctcccttctacaatgtctcacatgatacagttttccatcaatctgggatgtggaacgcatcagcctggtaacagtgtcagcttggaattttctaccaaccatgggcgctcctggtccctccttcacactgaatgcttacctgagatctgtgctggaccccacctcccccacagcactgtctactcctctgaaaactacagtgggtggaaccgaataacaattccccttcctaacgcagcactaacccggaacaccaggattcgctggagacaaacaggaccaatccttggaaacatgtgggcaattgataatgtttatattggcccgtcatgtctcaaattctgttctggcagaggacagtgcactagacatggttgcaagtgtgaccctggattttctggcccagcttgtgagatggcatcccagacattcccaatgtttatttctgaaagctttggcagttccaggctctcctcttaccataacttttactctatccgtggtgctgaagtcagctttggttgtggtgtcttggccagtggtaaggccctggttttcaacaaagaagggcggcgtcagctaattacatctttccttgacagctcacaatccaggtttctccagttcacactgagactggggagcaaatctgttctgagcacgtgcagagcccctgatcagcctggtgaaggagttttgctgcattattcttatgataatgggataacttggaaactcctggagcattattcatatctcagctatcatgagcccagaataatctccgtagaactaccaggtgatgcaaagcagtttggaattcagttcagatggtggcaaccgtatcattcttcccagagagaagatgtatgggctattgatgagattatcatgacatctgtgcttttcaacagcattagtcttgactttaccaatcttgtggaggtcactcagtctctgggattctaccttggaaatgttcagccatactgtggccacgactggaccctttgttttacaggagattctaaacttgcctcaagtatgcgctatgtggaaacacaatcaatgcagataggagcatcctatatgattcagttcagttnnnnnnnnnnnnnnnnnnnnnnnnnnnnnnnnnnnnnngacaaccaggtgaagctggagtactcaaccaaccacggccttacctggcacctcgtccaagaagaatgccttccaagtatgccaagttgtcaggaatttacatcagcaagtatttaccatgccagtgagtttacacagtggaggagagtcatagtgcttcttccccagaaaacttggtccagtgctacccgtttccgctggagccagagctattacacagctcaagacgagtgggctttggacagcatttacattgggcagcagtgccccaacatgtgcagtgggcatggctcatgcgatcatggcatatgcaggtgtgaccaggggtaccaaggcactgaatgccacccagaagctgcccttccgtccacaattatgtcagattttgagaaccagaatggctgggagtctgactggcaagaagttattgggggagaaattgtaaaaccagaacaagggtgtggtgtcatctcttctggatcatctctgtacttcagcaaggctgggaaaagacagctggtgagttgggacctggatacttcttgggtggactttgtccagttctacatccagataggcggagagagtgcttcatgcaacaagcctgacagcagagaggagggcgtcctccttcagtacagcaacaatgggggcatccagtggcacctgctagcagagatgtacttttcagacttcagcaaacccagatttgtctatctggagcttccagctgctgccaagaccccttgcaccaggttccgctggtggcagcccgtgttctcaggggaggactatgaccagtgggcagtcgatgacatcatcattctgtccgagaagcagaagcagatcatcccagttatcaatccaactttacctcagaacttttatgagaagccagcttttgattaccctatgaatcagatgagtgtgtggttgatgttggctaatgaaggaatggttaaaaatgaaaccttctgtgctgccacaccatcagcaatgatatttggaaaatcagatggagatcgatttgcagtaactcgagatttgaccctgaaacctggatatgtgctacagttcaagctaaacataggttgtgccaatcaattcagcagtactgctccagttcttcttcagtactctcatgatgctggtatgtcctggtttctggtgaaagaaggctgttacccggcttctgcaggcaaaggatgcgaaggaaactccagagaactaagtgagcccaccatgtatcacacaggggactttgaagaatggacaagaatcaccattgttattccaaggtctcttgcatccagcaagaccagattccgatggatccaggagagcagctcacagaaaaacgtgcctccatttggtttagatggagtgtacatatccgagccttgtcccagttactgcagtggccatggggactgcatttcaggagtgtgtttctgtgacctgggatatactgctgcacaaggaacctgtgtgtcaaatgtccccaatcacaatgagatgttcgataggtttgaggggaagctcagccctctgtggtacaagataacaggtgcccaggttggaactggctgtggaacacttaacgatggcaaatctctctacttcaatggccctgggaaaagggaagcccggacggtccctctggacaccaggaatatcagacttgttcaattttatatacaaattggaagcaaaacttcaggcattacctgcatcaaaccaagaactagaaatgaagggcttattgttcagtattcaaatgacaatgggatactctggcatttgcttcgagagttggacttcatgtccttcctggaaccacagatcatttccattgacctgccacaggacgcgaagacacctgcaacggcatttcgatggtggcaaccgcaacatgggaagcattcagcccagtgggctttggatgatgttcttataggaatgaatgacagctctcaaactggatttcaagacaaatttgatggctctatagatttgcaagccaactggtatcgaatccaaggaggtcaagttgatattgactgtctctctatggatactgctctgatattcactgaaaacataggaaaacctcgttatgctgagacctgggattttcatgtgtcagcatctacctttttgcagtttgaaatgagcatgggctgtagcaagcccttcagcaactcccacagtgtacagctccagtattctctgaannnnnnnnnnnnnnnnnntcttgtcaccgaagagtgtgttcctccaaccattggctgtctgcattacacggaaagttcaatttacacctcggaaagattccagaattggaagcggatcactgtctaccttccactctccaccatttctcccaggacccggttcagatggattcaggccaactacactgtgggggctgattcctgggcgattgataatgttgtactggcctcagggtgcccttggatgtgctcaggacgagggatttgtgatgctggacgctgtgtgtgtgaccggggctttggtggaccctattgtgttcctgttgttcctctgccctcgattcttaaagacgatttcaatgggaatttacatcnnnnnnnnnnnnnnnnnnnnnnnnnnncagagagggggaatctgaatggtgaaaccatcaaatctggaacatctctaatttttaaaggggaaggactaaggatgcttatttcaagagatctagattgtacaaatacaatgtatgtccagttttcacttagatttatagcaaaaagtaccccagagagatctcactctattctgttacaattctccatcagtggaggaatcacttggcacctgatggatgaattttactttcctcaaacaacgaatatacttttcatcaatgttcccttgccatacactgcccaaaccaatgctacaagattcagactctggcaaccttataataacggtaagaaagaagaaatctggattgttgatgacttcattatcgatggaaataatgtaaacaaccctgtgatgctcttggatacatttgattttgggcccagagaagacaattggtttttctatcctggtggtaacatcggtctttattgtccatattcttcaaagggggcacctgaagaagattcagctatggtgtttgtttcaaatgaagttggtgagcattccattaccacccgtgacctaaatgtgaatgagaacaccatcatacaatttgagatcaacgttggctgttcgactgatagctcatccgcggatccagtgagactggaattttcaagggacttcggggcgacctggcaccttctgctgcccctctgctaccacagcagcagccacgtcagctctttatgctccaccgagcaccaccccagcagcacctactacgcaggaaccatgcagggctggaggagggaggtcgtgcactttgggaagctgcacctttgtggatctgtccgtttcagatggtaccagggattttaccctgccggctctcagccagtgacatgggccattgataatgtctacatcggtccccagtgtgaggagatgtgtaatggacaggggagctgtatcaatggaaccaaatgtatatgtgaccctggctactcaggtccaacctgtaaaataagcaccaaaaatcctgattttctcaaagatgatttcgaaggtcagctagaatctgatagattcttattaatgagtggtgggaaaccatctcgaaagtgtggaatcctttctagtggaaannnnnnnnnnnnnnnnnnnnnnnnnnnnnnnntgttgatgacacgagacctggatttatcacatgctagatttgtgcagttcttcatgagactgggatgtggtaaaggcgttcctgaccccaggagtcaacccgtgctcctacagtattctctcaacggtggcctctcgtggagtcttcttcaggagttccttttcagcaattccagcaatgtgggcaggtacattgccctggagatacccttgaaagcccgttctggttctactcgccttcgctggtggcaaccgtctgagaatgggcacttctacagcccctgggttatcgatcagattcttattggaggaaatatttctggtaatacggtcttggaagatgatttcacaacccttgatagtaggaaatggctgcttcacccaggaggcaccaagatgcccgtgtgtggctctactggtgatgccctggtcttcattgaaaaggccagcacccgttacgtggtcagcacagacgttgccgtgaatgaggattccttcctacagatagacnnnnnnnnnnnnnnnnnnnnnnnnnnnnnnngttatgcgattgaattggaatactcagtagatcttggattgtcatggcacccattggtaagggactgtctgcctaccaatgtggaatgcagtcgctatcatctgcaacggatcctggtgtcagacactttcaacaagtggactagaatcactctgcctctccctccttataccaggtcccaagccactcgtttccgttggcatcaaccagctccttttgacaagcagcagacatgggcaatagataatgtctatatcggggatggctgcatagacatgtgcagtggccatgggagatgcatccagggaaactgcgtctgtgatgaacagtggggtggcctgtactgtgatgaccccgagacctctcttccaacccaactcaaagacaacttcaatcgagctccatccagtcagaactggctgactgtgaacggagggaaattgagtacagtgtgtggagccgtggcgtcggnnnnnnnnnnnnnnnnnngtgggggttgtagtcgattattagtcactgtggatctaaacctcactaatgctgagttcatccaattttacttcatgtatgggtgcctgattacaccaaacaaccgtaaccaaggtgttctcttggaatattctgtcaatggaggcattacctggaacctgctcatggagattttctatgaccagtacagtaagcccggatttgtgaatatccttctccctcctgatgctaaagagattgccactcgcttccgctggtggcagccaagacatgacggcctggatcagaacgactgggccattgacaatgtcctcatctcaggctctgctgaccaaaggaccgttatgctggacaccttcagcagcgccccagtaccccagcacgagcgctcccctgcagatgccggccctgtcgggaggatcgcctttgacatgtttatggaagacaaaacttcagtgaatgagcactggctattccatgatgattgtacagtagaaagattctgtgactcccctgatggtgtgatgctctgtggcagtcatgatggacgggaggtgtatgcagtgacccatgacctgactcccactgaaggctggattatgcaattcaagatctcagttggatgtaaggtgtctgaaaaaattgcccagaatcaaattcatgtgcagtattctactgacttcggtgtgagttggaattatctggtccctcagtgcttgcctgctgacccaaaatgctctggaagtgtttctcagccatctgtattctttccaactaaagggtggaaaaggatcacctacccacttcctgaaagcttagtgggaaatccggtaaggtttaggttctatcagaagtactcagacatgcagtgggcaatcgataatttctacctgggccctggatgcttggacaactgcaggggccatggagattgcttaagggaacagtgcatctgtgatccgggatactcagggccaaactgctacttgacccacactctgaagactttcctgaaggaacgctttgacagtgaagaaatcaaacctgacttatggatgtccttagaaggtggaagtacttgcactgagtgtggaattcttgccgaggacactgcactctattttgggggatccactgtgagacaagcggttacacaagatttggatcttcgaggtgcaaagttcctgcaatactgggggcgcatcggtagtgagaacaacatgacctcttgccatcgtcccatctgccggaaggaaggcgtgctgttggactactctaccgatggaggaattacctggactttgctccatgagatggattaccagaaatacatttctgttagacacgactacatacttcttcctgaagatgccctcaccaacacaactcgacttcgctggtggcagccttttgtgatcagcaatggaattgtggtctctggggtggagcgtgctcagtgggcactggacaacattttgattggtggagcagaaatcaatcccagccaattggtggacacttttgatgatgaaggcacttcccatgaagaaaactggagtttttaccctaatgctgtaaggacagcaggattttgtggcaatccatcctttcacctctattggccaaataaaaagaaggacaagactcacaatgctctctcctcccgagaactcattatacagccaggatacatgatgcagtttaaaattgtggtgggttgtgaagccacttcttgtggtgaccttcattccgtaatgctggaatacactaaggatgcaagatcggattcctggcagctcgtacagacccagtgccttccttcctcttctaacagcattggctgctcccctttccagttccatgaagccaccatctacaactctgtcaacagctcaagctggaaaagaatcaccatccagctgcctgaccatgtctcctctagtgcaacacagttccgctggatccagaagggagaagaaactgagaagcaaagctgggcaattgaccacgtgtacattggagaggcttgccccaagctctgcagcgggcacggatactgcacgaccggtgccatctgcatctgcgacgagagcttccaaggtgatgactgctctgttttcagtcacgaccttcccagttatattaaagataattttgagtccgcaagagtcaccgaggcaaactgggagaccattcaaggtggagtcataggaagtggctgtgggcagctggccccctacgcccatggagactcactgtactttaatggctgtcagatcaggcaagcagctaccaagcctctggatctcactcgagcaagcaaaatcatgtttgttttgcaaattgggagcatgtcgcagacggacagctgcaacagtgacctgagtggcccccacgctgtggacaaggcggtgctgctgcaatacagcgtcaacaacgggatcacctggcatgtcatcgcccagcaccagccaaaggacttcacacaagctcagagagtgtcttacaatgtccccctggaggcacggatgaaaggagtcttactgcgctggtggcaaccacgccacaatggaacaggtcatgatcaatgggctttggaccatgtggaggtcgtcctagtaagcactcgcaaacaaaattacatgatgaatttttcacgacaacatgggctcagacatttctacaacagaagacgaaggtcacttaggcgatacccatgaagaatcaaaaagtttattttttttcttccaacatgtgatgtgttgctctccattcttttaaatctcgcactacatctgatatcaggaaatatctgtgaaggacttggtgattacctgaaagcccttctcaagaccgagtgtacaccactttcccacactgtgaactaatgacaagtgacttatttgctcataagtaaatgtcttcatgttgatgtgtccgtgaaagttgtgatctgttgtaatatcagttacagtggcagtattgacaataagaaacagtttaacagaaaaatgaaatttaagcacaaaaaatttaagagattttatgtttaaaatggcatttagcacagtatttaacattcttggtcacaaagctatttaagtggactgtatttcagctatgtctcatgttttatatgattaaattatcattgtttgtcctttatgtattctcttctacaatacaacacattgaaactgtatttacttgttatgttgtaatattttgctgctgaatttggggctacttatattctgcagaaaattaattgaaatacctattcaagaagatagttgtaaagatattgtatctcctttaatatactccttaaaaatgtatgttggtttagcgttgttttgtggataagaaaaatgcttgaccctgaaatattttctactttaaattgtggatgaagaccctatctcccacaaataagttcccatttccttgtctaaagatctttttttaagtgttctgtggctgatttactaacagtaactgccattttttgtctgtgataacagagtgatttgtaaaacagtggttgttttttcattgtgttttcttcgtggattgttttttctgcgggtcatattcataccttctgatgaagttgtacaacaccagcaacattataatggccctgtagctctgaatgctatttgtgtaactgaaaggttgcactctagggtgaaccaagctataaaagcccatgcttaaataaaaattatgtccaaaagccaaccgtggacaaaaaaaaaccgtggactagtagccacgtggactagtagctaaccgtgac

SEQ ID NO: 7685 - DNA, 4115 bp, Homo sapiens; identical to SEQ ID NO: 7521
  misc_feature (1061)..(1077): n is a, c, g, or t

SEQ ID NO: 7686 - DNA, 422 bp, Homo sapiens
tttttttttttttttttaacaagctgaagttcaaataacacttaggtattggttaacaaaagctaggcaaacagccaaaaggatagctaagggtctgaaaaacattgcgaattttaaggcagctgagggtttgtaaacctgcagcatgtgcttgaagaatatgtattgtctttatctcctttcttccccacccacttcatgattcacagtcgcactaatgtccttttaggctataattaaaatgttctaatcttccagttcagttcagagttccagtttcaaatcagcatgaagacaatgacgaaggaaacatgaatttagatacagggacaattcaagcattatttcccaaatgactgtttcccaaactacgctcctgggataaagatggggatatttcaatgctgggaatcctcgtgccg

SEQ ID NO: 7687 - DNA, 4275 bp, Homo sapiens
ttgttaactttgtcaaagatcaggttgttgtaggtttttggctttatttctaggttctctactttgtttcatttgtctatgtgtctgtttctataccagtaccatgctgtttttgttactgtactcttctagtatagtttgaagttaggtagagtgacacttccagcttttttttttttttcttaaggttggcttggctatttgggctcttttttggttccatatgaactttaaaagtttttatttttctaattctctgaagaatgtcagtagttcaatgggaatagcattgaatctatgaattacttagggccatatgcccatattcatgatactgattcttcctctccatgagcatggaatatttctccatctgttttgtgtccactctgatttctctgagcagttgtttgtggttctccttgaagaggtccttcactttctttcttagctgtattcctaggtatttttttctctttgtagcaaatgtgaatgaaagttcattcatgatttgtctccctgcttgcctgttgtttgtgcatgggaatgctagctacttttgcacattgattttatatcctgagattttgctactgttgcttatcaccttaagaagctttgggcctgagacaatgaggttttctagatgtaggatcaggtcatctgcaaacaaagataatttgacttcctctctttctattagaatactctttatttcttcctctggcctgattttcctggccaaggcttctgatactatattgaatggtagtggtgaaagagggcattcttttcttgtgccagttttcaggtggaacgtttctagcttttgcacattcagtatgatattggctgtgggtttgttgtatatggctcttattattttcaggtatgtttcttcacttcctagtttattgagaattttaaacctgaaagaatgctgaattttattggatgctttttctgcatttattgagataatcatgtggtttttgtatttagttctctttatgtgatgagtcacatttattgatttgcatatgttgaatcaaccttgcatcctggggacaaagccaactccattgttgcggatgaactttttaatgtgctgctggatttgttttgccagtattttattgaggatttttgcacagtgtttaccaaagacattggcatgatgtgttgttgttgttgttgttgttgtagtatctatgttaggttttggtatctggatgatgctggcctgatagaatgagttagagagaacttctttgtcttcaattttttttggatggttttaggagaaaaggtaccatctcctctttgtacctctgctcaaattcagcttgcttggtaggctagtttttactgcctcagtttcagaacacattattgatctattcagggttcagtcttgtggagggtttattttgcaaggaaattgtctatttcttctagattttctggtttatgtgcatacatatgtttatagtgttctctgattgttgttcatatttccatgggatcagtgatgatatctcccttattatttctaattgtgtttggttctcctttcttttcttatttatttgcctagctagtgttccatctagtttattaatttttttcataaaaacagctcctggatttgttgacttttttttttggaagagttttcagtgtctctatctccctcagctctactttgatcttggttatttcttgttttctgctacctttctggttagttttcacttggttttctagttcttttcatcaagatgttaggctgttaattttagatcttctagtttctcttttttttcttcttgtggcagagtctcactctgtcacccaggctggagtacagtggcatgatctccgctcactgcaacctccacttctcagttttaagtgatttctgctgtctcagcttcctgagtagctgggattacagatgtgcatcacaaaaaccagctaatttttgaattttttttgtagaggtggggttttgttgtgtggtccagactggtcttgaacatctggccttaagtgatttgcctaccccagcctcccaaagtgctggaactacaggcatgagccaccacacccagccctttctatctttttgatgtggacattagtgctataaatttccctcttttcttggtttccagtgattattttattctatcttggtgagtcatcagggaaataatcttaaatttacaatcaacatatagtttaaatccatataattgtgtgagaagaaccctttgttatttgaaggtgatgtttgaaagattttctaacggtgccttttagttagtcttaaatttctaattgtagttaaaaacatgccattgtcatttctgacattttaagtatatggtttagaagtggttagtatagttctattgttttgcagtaggttttagataatttgtgtcttacaaaagtaaaagtgaatactcattacttatgaaagaagttagttagcttgccttaggtagatagcaagagaagagtccctggaaagtccctggtcagtgcctcatccctgcataacatataaagaagcctggaaaaaatcaagctgcagacactaacaagggaactagcatatgttgttgtgcttggggacatgcccgtggctgcacagatagaaaaacctctggcccatttggataaaaacttgtagaaacctccagctcactcagataaaggaacaagaacgacctagcatagaaatgcctttgtttggccaggcacggtggatcatgcctgtaattccaacaatgtcggaggcagctgtgggcggatcatctgaggtcgggagtttgagaccagcatgaccaagatggacaaactctgtctttactaaaaatacaaaactagccaggcatggtgctgcatgcctataatcccagctacttgggaggctgaggcaggagaatcgctagaacccaggaggcggaggtttctgtgagccgagatcgcaccattacactccaggctgggcaacaagagcaaaactgcaaaaaaaaataaaaataaataaaaaaagaaagtacatctcaaaaaaaagaaagacaagaaaaagaaaaaaaagaagcacttttgtctttgtacagtcagtgggctcccaggaaaatgttccttctctttttgttggcatgggcactgtgggatctggtgcattccggtcgacactctcgtttatttggactgtaagtctgacctctatgaataattacttcagcccctgagtgctcccgggccaagctccttggccaaactttcaccttagcttctgataagtcttgggccaagctaagcagcatctatcaatcatcccttcagctcctgattgatcccgggccaaaggcctgggccaagctgagccacacgtttttcaagacagcctgtgaactaggcacatatccttcccttcccagtccataaaaaccctggacccagcctcgtagagggcaccactttcagacacctatctctgctggcaaagagctttcttctcttgcttcttaaactttcactccaacctcacctttgtgttcacgctccttaatctccttagaggtagaacaaagaactctggatgttatctcagactacgagagactgttacatcttggtgcactgctgagactacgacacttggtttctttgagtttgactaaatattttacatgagtgtaattatacagctttcctttttgactgtcttattttacttaacagaatgttttgaagatttgtccttattgtagtacttttcaagatttccttatttttaaggctgaatgctatcccagtgattgtacgtgccctgtttgctgaatctactcatccttaagggtacatttgcttccaggtaacatgtttgtgagtaatactacaatgtgcatatatctattccatgttctgctttgtctgtttgggatatttttcatacactgattcagtaccatgtgtattcccttgcttttgttgtctcatccgttgatgctacgtcccccaaattattgccacgaccagttgtaatgaagcttcacccttctgtattgtgctaggaattttacagctataggttttacattatagtcttcattcattttttaaaattgacacatgtaattgtgcatattttggggaaacaattatatatatgtgttgtataacaataaaaatcagtacttctataaaaaaaaaaaaaaaaaaattttaataaatactgtgttcatcatctaaaaa

SEQ ID NO: 7688 - DNA, 2667 bp, Homo sapiens
acttcggagagagaatgtagaatggaggaggtgaggaatttaactaatagagatgctttttctaacaggcagaaattagagaaatggatcaaaagatttaaacattgattacatataaacgagtttcctttttttctacatagcacacaggtgctcaacatttaatgaataatataacagatactgtcttaaaagtttaaaaacaggatttgtacttaatcctaaattcctcttatcacacaccagaaaataatttggattttatttacaaactacatccaaatactcttaaggaaagagtgtcatttagcttggagtagggactgactggggtctaagtgttggaaattaaattctgccattcagtccaacctcaaaggtcttccaggcaaggagttttgcaaggactagaaaccctttcacacttgaagtgcaggtgttggctgaaagaatagagggacatttcacaaacacagaacacggctcccctacaggaaagggatggagacagctacctttgctcttgctctcacattctctgtcctcatggactttcttctctgtttccctctgcctatctatctgcctggttctcttgcttctcctggccaaccagctttctcattagtgcatatgtagctgaaaaatccacccctcaagaacccactccacacaacctttccttttcagtacccaccacgctctgactagcatctctgtgacgcctaaggcaaatttttgaggatctgattggtttagttcatctgcctatgggtgagccaccctggggtcaggtgcctgtccaatcacctgttaccaaggaggcagggccgtgtcatttaagcatggccccatggactgaccctttcagcagggacttttattgggggctggtacccagaagaaggagcatgagtgggcaagaccttcaaaaagaacctactacacactggaactgactagtactcctgggatgccatgccacgcagcagccagcactcggagagcagtcccctggatactaccacacagagaaaaggggcatcttcacttgcacatcaggtgagggtgcacacacttgaaactctgctagactggccagagctgccccagccacttctcaccccaccaccagttattgatacagccgctgggtctaggaagcgatttctgaacaaggcccagttagcacaatgtcttgctcagcagacaataaatacttgtaaattgaattgcatgatcttagctcaggtgctactaatgtggctcacggccacacacttgcatggataagaaaaccaatgagcccctcaacagagtcttttgaaacaaaattggtttcaagtgaaacttacattattttttggctgtgaccttctgaatataataacttagtgtcctgagaattgaaaggcctcttgatttcttaggtgaactgttacagaatcctagcctgtggtaaatgctaaaatgtaaggtgtttctgagaaggaatatttaggaaatataattgtgccacacacacattactttagaagatatgcagttgctctgattctgcaggtttaaaaaaaatgggaagtttgtgatatggcagaatctgtctccattggtcaaaccatacttcagtgagagccattataagtgaaatctaaaaattgatcgttttcattctctgactttggtcagacttttgcaaattatggagagaggccatcaacatattttacataaattactgtggccccatcttatttctcctcatttcttccttatgtttaaacacgcccccatctcacacacaaactgagaaaagatttgtatcaaacagaatcagaggcatatgaatggactggaaattgtgaaaaaggtataaatatcctagaccttgatcaactcactttaaactggtctctgattcctcatctgtcaaatgagtataagaccctctgtacttcccatggtgattttgaggagcacatgcataatgtatctgaaaatggcttgacaagcacttgaagccattcttactaaattattagttttgtaattcggttttatccaggaaaatattttagctcctcctatctgctgaattaatttatacagtcacatgttccatgacaccatgttttgccaaggaaaaataaagaaattcctaaatttgaaattgcccacaagatctagcctcatctggagttgctgttattgtccttgttgtctatgatttggaggatatgtaagtacttgtacatgtgctttaactctgggtgaaaaaccccaaccggtgagtctttaaaaccatattagacacattgggcaaagtactgagcagaagctttgaatgtagctgttgttattttaatgcttcgctttctaatgaactttgtacgtccttagcctctgccgggaacagagtgttcatatgctgttagaattttttattgtaaaataaaatgacaaaggctttcataccccaaaaaaaaaaaaaaaaaaaaaaaaaaaaaaaaaaaaaaaaaaaaaaaggggcgccttgccccctttttaaagggccccaaggggcatataacgggcgggggcgtacaccggcggaaactcccggttctgacccctctggggtatgacccccaagcggcatacttgttggccctcccggtctcgtaaacc

SEQ ID NO: 7689 - DNA, 2791 bp, Homo sapiens
gtgtgactgaagaggagcggacggttcccagcgtctgctcccacggtgtccagcgcccagaatgcggcttctggtcctgctatggggttgcctgctgctcccaggttatgaagccctggagggcccagaggaaatcagcgggttcgaaggggacactgtgtccctgcagtgcacctacagggaagagctgagggaccaccggaagtactggtgcaggaagggtgggatcctcttctctcgctgctctggcaccatctatgcagaagaagaaggccaggagacaatgaagggcagggtgtccatccgtgacagccgccaggagctctcgctcattgtgaccctgtggaacctcaccctgcaagacgctggggagtactggtgtggggtcgaaaaacggggccccgatgagtctttactgatctctctgttcgtctttccaggaccctgctgtcctccctccccttctcccaccttccagcctctggctacaacacgcctgcagcccaaggcaaaagctcagcaaacccagcccccaggattgacttctcctgggctctacccggcagccaccacagccaagcaggggaagacaggggctgaggcccctccattgccagggacttcccagtacgggcacgaaaggacttctcagtacacaggaacctctcctcacccagcgacctctcctcctgcagggagctcccgcccccccatgcagctgaactccacctcagcagaggacaccagtccagctctcagcagtggcagctctaagcccagggtgtccatcccgatggtccgcatactggccccagtcctggtgctgctgagccttctgtcagccgcaggcctgatcgccttctgcagccacctgctcctgtggagaaaggaagctcaacaggccacggagacacagaggaacgagaagttctgcctctcacgcttgactgcggaggaaaaggaagccccttcccaggcccctgagggggacgtgatctcgatgcctcccctccacacatctgaggaggagctgggcttctcgaagtttgtctcagcgtagggcaggaggccctcctggccaggccagcagtgaagcagtatggctggctggatcagcaccgattcccgaaagctttccacctcagcctcagagtccagctgcccggactccagggctctccccaccctccccaggttctcctcttgcatgttccagcctgacctagaagcgtttgtcagccctggagcccagagcggtggccttgctcttccggctggagactgggacatccctgataggttcacatccctgggcagagtaccaggctgctgaccctcagcagggccagacaaggctcagtggatctggtctgagtttcaatctgccaggaactcctgggcctcatgcccagtgtcggaccctgccttcctcccactccagaccccaccttgtcttccctccctggcgtcctcagacttagtcccacggtctcctgcatcagctggtgatgaagaggagcatgctggggtgagactgggattctggcttctctttgaaccacctgcatcccagcccttcaggaagcctgtgaaaaacgtgattcctgggccccaccaagacccaccaaaaccatctctggggcttggtgcaggactctgaatttctaacaatgcccagtgactgtcgcacttgagtttgagggccagtgggcctgatgaacgctcagacccctccagcttagagtctgcatttgggctgtgacgtctcccacctgccccaataagatctgctctgtctgcgacaccaagatccagctggggactcccctgaggcctgcctaagtccaggccttggtcaggtcaggtgcacattgcagggataagcccaggaccggcagagagtggttgcctttccatttgccctccctggccatgccttcttgcctttggaaaaatgatgaagaaaaccttggctccttccttgtctggaaagggttacttgcctatgggttctggtggctagagagaaaagtagaaaaccagagtgcacgtaggtgtctaacacagaggagagtaggaacagggcggatacctgaaggtgactccgagtccagccccctggagaaggggtcgggggtggtggtaaagtagcacaactactattttttttctttttccattattattgttttttaagacagaatctcgtgctgctgcccaggctggagtgcagtggcacgatctgcaaactccgcctcctgggttcaagtgattcttctgcctcagcctcccgagtagctgggattacaggcacgcaccaccacacctggctaatttttgtacttttagtagagatggggtttcaccatgttggccaggctggtcttgaactcctgacctcaaatgagcctcctgcttcagtctcccaaattgccgggattacaggcatgagccactgtgtctggccctatttcctttaaaaagtgaaattaagagttgttcagtatgcaaaacttggaaagatggaggagaaaaagaaaaggaagaaaaaaatgtcacccatagtctcaccagagactatcattatttcgttttgttgtacttccttccactcttttcttcttcacataatttgccggtgttctttttacagagcaattatcttgtatatacaactttgtatcctgccttttccaccttatcgttccatcactttattccagcacttctctgtgttttacagacctttttataaataaaatgttcatcagctgcaaaaaaaaaaaaaaaa

SEQ ID NO: 7690 - DNA, 16684 bp, Homo sapiens
  misc_feature (857)..(877): n is a, c, g, or t
  misc_feature (1454)..(1488): n is a, c, g, or t
  misc_feature (1960)..(2049): n is a, c, g, or t
  misc_feature (3121)..(3143): n is a, c, g, or t
  misc_feature (4680)..(4703): n is a, c, g, or t
  misc_feature (6993)..(7011): n is a, c, g, or t
  misc_feature (10498)..(10533): n is a, c, g, or t
  misc_feature (13384)..(13422): n is a, c, g, or t
  misc_feature (13686)..(13756): n is a, c, g, or t
  misc_feature (15350)..(15368): n is a, c, g, or t
gcagctgccacttttcaccgttagaagtagagctttttccagacctcctaccttttagtctactttgaaaggtgaaagaaagaacatcgtttcaggaataaaaatgcacagtagtagttatagttaccgtagcagtgattctgtgtttagtaacactaccagcactcgaaccagtcttgattcaaatgaaaatcttctcttggttcattgtggtccaacactgatcaactcttgcattagcttcggcagtgaatcctttgatggacacaggttagaaatgttgcaacagattgccaacagagttcagagggacagtgtcatctgtgaagacaaactgattcttgctggaaatgctcttcagtctgattctaaaagattagaatcaggagtgcagtttcagaatgaagcagaaattgctgggtatatacttgaatgtgagaaccttttacgccagcatgtaattgatgtacagattcttattgatggaaaatactaccaggcagatcaattggtacagagggttgcaaaactgcgtgacgaaattatggccttaaggaacgaatgttcttctgtgtacagcaaaggacgcatactgacaacagaacagacaaagctcatgatatcaggaatcactcaaagtttaaactcaggatttgcacagaccttacaccctagtctgacctcagggctgacccagagtttaacaccttccctaacctcttctagtatgacttctggcctgtcatcagggatgacttcccgcctgactccatctgtcactccagcttatacacctggtttcccatcaggattagttccaaatttcagttcaggagtagagccaaattcattgcaannnnnnnnnnnnnnnnnnnnncgaaaaccccttctaaagtcttctttgctggatcaaaatttaacagaagaagaaatcaatatgaaatttgttcaggatcttttgaattgggttgatgagatgcaggtacaactggaccgcactgagtggggctcagatttgccaagtgttgaaagccatttagaaaatcataaaaatgttcatagagctattgaagaatttgaatctagtctcaaagaagctaaaatcagtgagattcaaatgacagcacctcttaaactgacttatgcagaaaagttgcacagattagagagtcagtatgcaaaactcttgaatacatccaggaatcaagaacggcaccttgatacactccataattttgtaagtcgtgcgactaatgaacttatttggttgaatgaaaaagaagaggaggaagttgcttatgactggagtgagagaaacaccaacatagctaggaaaaaagattatcatgctgaattaatgagagaacttgatcaaaaggaagaaaatattaaatcagttcaggagatagcagagcagctacttctagaaaatcatccagcccggttaactattnnnnnnnnnnnnnnnnnnnnnnnnnnnnnnnnnnnctggatcttacagctctgccagtgtgtggagcagcacataaaggagaacacagcgtatttcgagtttttcaatgatgccaaagaagctactgattacttaaggaatctaaaagatgccattcagcggaagtacagctgtgatagatcaagcagcattcacaagctagaagaccttgttcaggaatcaatggaagagaaagaagaacttctgcagtacaaaagcactatagcaaacctaatgggaaaagcaaaaacaataattcaactgaagccaaggaattctgactgtccactcaaaacttctattccgatcaaagctatctgtgactacagacaaattgagataaccatttacaaagacgatgaatgtgttttggcgaataactctcatcgtgctaaatggaaggtcattagtcctactgggaatgaggctatggtcccatctgtgtgcttcaccgttcctccaccaaannnnnnnnnnnnnnnnnnnnnnnnnnnnnnnnnnnnnnnnnnnnnnnnnnnnnnnnnnnnnnnnnnnnnnnnnnnnnnnnnnnnnnnnnnaagagtgtagtatcctggcattatctcatcaatgaaattgatagaattcgagctagcaatgtggcttcaataaagacaatgctacctggtgaacatcagcaagttctaagtaatctacaatctcgttttgaagattttctggaagatagccaggaatcccaagtcttttcaggctcagatataacacaactggaaaaggaggttaatgtatgtaagcagtattatcaagaacttcttaaatctgcagaaagagaggagcaagaggaatcagtttataatctctacatctctgaagttcgaaacattagacttcggttagagaactgtgaagatcggctgattagacagattcgaactcccctggaaagagatgatttgcatgaaagtgtgttcagaatcacagaacaggagaaactaaagaaagagctggaacgacttaaagatgatttgggaacaatcacaaataagtgtgaggagtttttcagtcaagcagcagcctcttcatcagtccctaccctacgatcagagcttaatgtggtccttcagaacatgaaccaagtctattctatgtcttccacttacatagataagttgaaaactgttaacttggtgttaaaaaacactcaagctgcagaagccctcgtaaaactctatgaaactaaactgtgtgaagaagaagcagttatagctgacaagaataatattgagaatctaataagtactttaaagcaatggagatctgaagtagatgaaaagagacaggtattccatgccttagaggatgagttgcagaaagctaaagccatcagtgatgaaatgtttaaaacgtataaagaacgggaccttgattttgactggcacaaagaaaaagcagatcaattagttgaaaggtggcaaaatgttcatgtgcagattgacaacaggttacgggacttagagggcattggcaaatcactgaagtactacagagacacttaccatcctttagatgattggatccagcaggttgaaactactcagagaaagattcaggaaaatcagcctgaaaatagtaaaaccctagccacacagnnnnnnnnnnnnnnnnnnnnnnnggtgtccgaaatagaaatgaaacagagcaaaatggacgagtgtcaaaaatatgcagaacagtactcagctacagtgaaggactatgaattacaaacaatgacctaccgggccatggtagattcacaacaaaaatctccagtgaaacgccgaagaatgcagagttcagcagatctcattattcaagagttcatggacctaaggactcgatatactgccctggtcactctcatgacacaatatattaaatttgctggtgattcattgaagaggctggaagaggaggagaagtcactggaagaagaaaagaaagaacatgttgaaaaagccaaagaattgcaaaaatgggtatcaaatatcagcaagacattgaaagatgcagagaaggctggaaaacctcccttctctaagcaaaagatttccagtgaggaaatatcaaccaagaaggaacaattatcggaagcacttcaaactatacagctttttttggcaaaacatggagacaaaatgacagatgaagaaagaaatgaattggaaaaacaagtgaaaactcttcaggaaagttataatttattattcagtgaatctctgaaacagctacaagaatcacaaacctcaggagatgtaaaggtagaggagaagattgtagcagagcgtcagcaggagtataaagagaaactccaagggatatgtgatcttcttacccaaactgaaaaccgcctaattggtcaccaagaagccttcatgattggagatggcacagttgagttaaagaaatatcagtccaagcaagaggaattacagaaagatatgcaaggaagtgcacaggcattggctgaagtagtgaaaaacacagagaacttcttaaaagagaatggtgaaaagctgtcacaggaagataaggctttgattgaacagaaacttaatgaagctaagataaagtgtgaacagcttaatttaaaagcagaacagtctaaaaaggagctggataaagttgtgacaacagcaatcaaggaagaaactgaaaaggtagcagcagtgaagcagctggaagagagcaaaaccaaaatagaaaaccttttggactggttgtcaaatgttgacaaagactcagaaagggcagggacaaaacacaaacaggtaatcgaacagaacgggacccattttcaagaaggtgatggcaagtcagcaattggagaagaggatgaagttaatggtaacctgttggagactgatgttgatgggcaagttggaaccactcaggagaatctgaatcagcaatatcagaaagttaaggcccaacacgagaagatcatctctcagcaccaagcagtgatcatagccactcagtctgcacaagtgttgcttgagaaacagggtcagtatctctctcctgaagaaaaagagaaactgcaaaagaacatgaaggaactgaaagtgcattatgaaactgcactggctgagtcagagaagaaaatgaagttaactcactctctgcaggaagaattagaaaagtttgatgctgactataccgagttnnnnnnnnnnnnnnnnnnnnnnnnaacaagaacttgaaaacctggaggcaggtgcagatgacatcaatggtttaatgaccaaattgaagaggcagaagagtttctcagaagacgttatttctcacaaaggtgacttgagatacatcacaatttctggaaacagagtgttggaagctgccaaatcttgcagcaagagagacggtggcaaggttgatacttctgcaacccacagagaagtgcagcgcaagttggatcatgctactgatcggttcaggtctctctactctaagtgcaatgttcttggaaataatcttaaagatctggtggataaatatcaacactatgaagatgcttcatgtggacttcttgctggactccaggcctgtgaggccacagcgagcaaacacttatctgaacctattgcggtggaccccaaaaatcttcaaaggcaattagaagagaccaaggctttgcaaggacagatatcaagtcagcaggttgctgtagagaaactgaagaaaacggctgaagtgcttttagatgccaggggatctttacttccagccaagaatgatatccagaaaacacttgatgacattgttgggagatatgaggatctgtccaagtctgttaatgaacgaaatgaaaaactccagataaccttgacccgttcactgagtgtgcaggatggcttggatgaaatgctggactggatgggaaatgtggaaagttctctgaaagaacaaggtcaagtgcctttaaactctactgctcttcaggatattatcagtaaaaacattatgttggaacaggatattgcaggtcgtcagagcagtataaatgccatgaatgaaaaagtgaagaaatttatggaaacaacagatccatccactgcatcctcactgcaagccaaaatgaaagacttgtctgctcggttttcagaagcaagtcataaacacaaagaaactcttgccaaaatggaggagctaaaaaccaaagtagaactgtttgagaacctctcagaaaagctccagacatttttagaaacaaaaactcaggctcttactgaagtagatgtgccaggaaaagatgttactgaattgtctcagtatatgcaggaatcaacttctgaatttttagaacacaagaaacatcttgaagttttgcatagtctcttgaaggagatatccagccatggcttaccaagtgataaggctttggtccttgaaaaaacaaataatttgtcaaagaaattcaaggaaatggaggataccatcaaagaaaaaaaagaagctgtaacttcttgtcaagaacagttggatgctttccaagttcttgttaaatcattgaagtcatggataaaagaaacaacaaaaaaagttcccattgtacagccttcttttggtgcagaggatttaggaaaatctttggaagacactaagaaattacaagaaaagtggagtttaaaaacaccagagattcagaaagtaaacaacagtgggatctcactatgtaacttaataagtgctgtgaccacccctgcaaaggcaatagcagcagttaaatcaggtggagcagtattaaatggtgaaggaacagccacaaatactgaggaattttgggcaaataaaggtttaacatccattaaaaaggacatgactgacataagtcatggttatgaagatcttggcctcttactcaaggacaaaatagcggaactgaacactaaactctccaaattgcaaaaggctcaggaagaatcaagtgcaatgatgcagtggttacagaaaatgaacaaaactgcaacaaaatggcagcagacacctgcacctacagatactgaagctgtgaagactcaagttgagcagaataagtcgtttgaggcagaactgaagcagaatgtaaacaaagtacaggagttgaaagacaaattgacagagctgttggaggagaacccagatactcctgaggcccccagatggaaacagatgttgacagaaatagattctaagtggcaagaactcaatcaattaacaattgatagacaacaaaaactggaagaatcctccaataatctaacccagttccagactgtagaggcccaattgaaacagtggcttgtggaaaaagaacttatggtcagtgttcttgggcccttgtcaattgacccaaatatgctaaacacacaaaggcagcaggtgcagattttgctgcaagaattcgccactcggaaacctcaatatgaacagctgacagcagctggtcagggcattctgagcaggcctggagaagacccttctttacgtgggattgnnnnnnnnnnnnnnnnnnntgtgacccaaaaatgggatagcctaacagggcaattgagtgacagatgtgactggattgaccaagccattgttaaaagcacacagtatcaaagcctgctgagaagcctttctgataaactgagtgacttggataataaactcagcagcagtctggctgtgagcacgcaccctgatgctatgaaccaacagttggaaacagcccaaaaaatgaagcaggagatacagcaggaaaagaagcagataaaagtggcccaggcactctgtgaggatttgtcagcactggttaaagaagagtacttgaaagcagaacttagtaggcaactagaaggcatcttaaaatcatttaaggatgttgaacagaaagcagagaatcatgtccagcaccttcagtcggcctgtgcaagctctcatcaatttcagcaaatgtctagagattttcaggcttggctggatacaaagaaagaagagcaaaacaaatctcatccaatatctgccaaactcgatgtcttggagtcattaattaaagatcataaagactttagtaaaactttgaccgctcagtctcatatgtatgaaaaaaccattgcagaaggtgaaaatctgttattaaaaacacaagggtctgagaaggcagccttacagttacagcttaatacaattaaaaccaattgggatacatttaataagcaggtgaaagaaagagaaaacaagttaaaagagtcattggaaaaagcccttaagtataaagagcaagtagagactctctggccatggatagacaaatgccaaaacaacctggaggaaataaaattttgcttggatcctgctgaaggagagaattctattgccaagttaaagtctctgcagaaggaaatggaccaacactttggtatggtagaattactgaacaacacagccaatagcttgctcagtgtctgtgagatagataaaggagttgttacagatgagaataagtcactgatccagaaggtggacatggtcactgaacaacttcacagtaagaaattctgtctggagaacatgactcagaagtttaaagaatttcaagaagtttccaaagaatctaaaaggcagcttcagtgtgcaaaggagcagctagatatccatgattcgctgggatcccaggcttacagtaacaaatacctgaccatgttgcaaactcagcagaaatcacttcaggccttgaagcatcaggtagatttggctaaaagacttgcacaggaccttgtggtagaggcctcagactcaaagggaacctctgatgttttattacaagtggaaaccatagctcaagagcatagtacactaagtcagcaggttgatgaaaagtgttctttcttagaaaccaagcttcagggcattgggcatttccagaataccattcgagaaatgttttctcagttcgcagagtttgatgatgaactggatagcatggctccagtggggagagatgcagaaacattgcaaaagcaaaaggaaactataaaagcctttctaaagaaactagaagccctcatggcaagcaatgacaatgccaataaaacctgcaagatgatgttagccacagaagaaacctctcctgaccttgttggaatcaaaagggacttggaggccttaagcaaacaatgcaacaagttactggaccgagcccaagccagagaagagcaggttgaagggacaattaagcgccttgaagaattttacagcaaattgaaagaattttctattctgctccagaaagccgaagaacatgaagagtcacaaggtcctgttggtatggaaacggagacaattaatcagcagcttaacatgttcaaggtattccagaaagaagagattgaacccttgcaaggtaaacagcaagatgtaaactggttaggtcaaggccttattcagagtgctgccaaaagcactagcactcagggcttggagcatgacctggatgatgtcaatgcacggtggaagactctcaataagaaggtggctcagcgagcagcccagctgcaggaggccttgctgcactgtgggaggttccaggatgccctggagtccctgctcagctggatggtggacactgaggagcttgtggccaatcagaagcccccgtcggctgagttcaaagtggtaaaggcccagatacaagaacaaaagcttctccagagattgttggatgaccgaaaatctacggtggaggtaatcaaacgagaaggagaaaaaattgctacaacagcagagcccgcagataaagtgaagattttgaaacagctcagtctcttggatagcagatgggaggcattgcttaataaagctgaaacaaggaatcgtcagttggaaggtatctcggtggtagcacagcaatttcatgaaaccttagaaccactgaacgagtggcttacaaccatagaaaagaggctggtgaattgtgaacccataggaacccaagcatctaaacttgaggaacaaattgcacagcacaaagccttagaagatgacatcatcaatcacaataaacatttacaccaggctgttagcattggccagtccttaaaggttttgagctccagggaggataaagatatggtgcagagtaaattagacttctctcaagtatggtacattgagattcaagagaaaagtcacagcaggtctgagctcctccagcaggccttatgtaatgctaagatttttggggaagatgaagttgaactgatgaactggctgaatgaagtgcatgacaaactgagcaagctctcagtccaggattacagcactgaggggctatggaagcagcagtctgaacttcgggttctgcaagaggacatcttactcaggaaacaaaatgtagatcaggctttactaaatggtttagaactacttaaacaaaccacaggtgatgaagttttaataattcaagataaattggaagccattaaagcaaggtacaaagacattactaaactgagcactgatgtggccaagactctggaacaggcgctgcagcttgcaaggcggctgcactccacacacgaagagctgtgtacctggctggacaaagtggaggtggaattactttcatatgaaactcaggttctgaaaggagaagaagcaagtcaagcacaaatgagaccaaaggaactgaaaaaggaagctaagaacaacaaagccttactggactcccttaatgaagtgagcagtgctttgctggaactggtaccatggagggcaagagaaggacttgagaaaatggtagctgaggacaatgagcgctaccgattagtgagcgacaccatcactcagaaggtggaggagatcgatgcagccattctgcgatcacagcagtttgaccaagcagctgatgctgagttatcctggattactgaaacagaaaaaaaattgatgtctctgggtgacatcaggcttgagcaagaccagacttctgctcagcttcaagttcaaaagacattnnnnnnnnnnnnnnnnnnnnnnnnnnnnnnnnnnnntgaccttgttaaatctgggcataaaatcatgaccgcatgcagtgaagaggaaaagcaatcaatgaagaaaaaactggacaaggtactgaagaactatgataccatctgccagattaattcagaaaggtatctgcagctggaacgggcacagtccctggttaaccaattctgggaaacatatgaagaactttggccatggctgacagaaacacaatcaatcatctctcagcttcccgccccagcccttgaatatgaaactctaaggcagcagcaggaagaacatcggcaactgcgtgagttgatagctgaacacaagcctcatatagataagatgaacaaaactgggccacagttactggaattgagccctggggaaggcttttctatccaagagaagtatgtggcagccgacaccctttacagtcaaattaaagaagatgtcaaaaagcgtgctgtggcactggatgaagccatttctcaatcaactcagttccatgacaagatagatcagatccttgagagcctggaacgcatcgtggaaggtttgaggcagccaccctctatctctgcagaggttgagaagatcaaggaacagatcagtgaaaataagaatgtgtcagtagacatggaaaagctacagccgttgtatgaaactcttaaacagaggggagaggaaatgattgctagatctggggggactgataaagacatatctgccaaagctgttcaggataagcttgaccaaatggttttcatttgggagaacatacacacactggtggaagagagggaagccaaactactggatgtgatggagctagcagaaaagttctggtgtgatcacatgtcattgatagttaccattaaagatactcaagatttcatccgggacctggaagatcctggaattgatccttcagtagtaaaacaacagcaagaagcagcagagaccataagggaagaaatagatggactacaggaggagctggatatagttattaacctaggttctgaactcattgcggcatgtggggagcctgataaacccattgtcaagaagagtatagatgagttaaattcagcatgggattctctaaataaagcttggaaagaccggattgacaaacttgaggaggcaatgcaggctgccgttcagtaccaggatggactgcaggcggtatttgactgggtagatattgcaggtggtaaattagcttcaatgtctccaattggaacagatctcgaaactgtcaagcagcagattgaagagctaaagcaatttaagtctgaggcctatcaacagcagatagaaatggaaagactgaatcatcaagcagagcttttgctaaagaaagtaacagaagagagtgacaaacacactgttcaagacccattaatggaactgaaattgatatgggatagcctggaggagagaatcatcaacagacagcataaactggagggtgctctattagccttgggtcagttccaacatgccctggatgagctcctggcatggctgacacacaccgagggcttgctaagtgagcagaaacctgttggaggagaccctaaagccattgaaattgaacttgccaagcatcatgtgctccaaaatgatgtattagcccatcagtccacagtggaagccgttaataaagcaggaaatgatctaattgaatcaagtgcaggagaagaagcaagcaaccttcagaacaagctagaggttttaaatcaacgctggcaaaatgttttggaaaaaacagaacaaaggaagcagcagctggatggtgccttgcgccaggccaaagggttccatggcgaaattgaggatttgcagcagtggctgactgacacggagcgtcatctgttggcatctaaaccgctgggaggtttaccggaaacagccaaggagcagcttaatgtccatatggaagtctgtgctgcctttgaagctaaagaagaaacatataagagtctgatgcagaaaggccagcagatgcttgcaagatgcccaaaatctgcagagacaaatattgaccaagacataaataacttgaaagaaaaatgggaatcggtggaaaccaaactcaatgaaaggaaaactaaactggaagaggctctcaacttggcaatggagttccacaattctctccaagacttcatcaactggcttactcaggctgaacagaccctaaatgtagcttctcggccaagtctcatcttggacacagtcttatttcaaattgacgaacacaaggtttttgccaatgaagtaaattctcatcgtgagcagataatagagctggacaaaactggaacccacctaaaatattttagtcagaaacaagatgttgttctaatcaagaatctacttatcagtgtacaaagtcgatgggaaaaagtggttcaacggttggtagagagaggaagatctttggatgatgcaaggaagagagccaagcagttccatgaagcttggagtaaacttatggagtggctagaagagtcagaaaagtctttggattctgaactggaaatcgcaaatgatccagacaaaataaaaacacaacttgcacaacataaggagtttcagaaatcactcggagccaagcattctgtctacgacaccaccaacaggactggacgttctctgaaggagaaaacctccctggctgatgacaacctgaaactggatgacatgctgagtgaactcagagacaaatgggataccatatgtggaaaatctgtggaaagacaaaacaaattggaggaagccctgttattttctggacaattcacagatgccctacaggctctcattgattggttatatagagttgaaccccannnnnnnnnnnnnnnnnnnnnnnnnnnnnnnnnnnnnnnggtgatgaatctgatcgataatcacaaggccttccaaaaagagttggggaagaggaccagcagtgtgcaggccctgaagcgctcagcccgagaactcatagaaggcagtcgggatgactcctcctgggtcaaggtccagatgcaggaattaagcacacgctgggagaccgtgtgtgcactttctatatcaaagcaaacacggttagaagcagccctgcgtcaggcagaggaattccactcggtggtacatgccctcttggagtnnnnnnnnnnnnnnnnnnnnnnnnnnnnnnnnnnnnnnnnnnnnnnnnnnnnnnnnnnnnnnnnnnnnnnnactctcattgatcagcataaagaattcatgaagaaactggaagaaaagagagctgaactaaataaagccaccactatgggcgacaccgttttggctatctgccaccccgactccatcactaccattaagcactggataacaatcatccgggcgaggtttgaggaggtgctggcctgggcaaagcaacatcagcagagattagcaagtgctctggctgggcttattgccaaacaggaattgttggaagctttgctggcttggttgcaatgggctgaaactacacttactgataaggataaagaagtcatcccccaggagatcgaagaggtgaaagcactcattgcagaacaccagaccttcatggaggaaatgaccagaaaacagcctgatgttgataaagtaacgaagacctataagaggagagctgctgatccttcctcattacaatcccatattccagtcttggataagggacgagcaggaagaaaacgctttccagcatcaagcttgtatccctctgggtcacagacacaaattgaaaccaaaaatcctagggtaaacttactggtgagcaaatggcagcaagtctggctcctggcgttggaaagaaggaggaaactcaatgatgccttggacagactagaggagctgagggaatttgctaactttgattttgatatctggcgcaaaaaatacatgcgatggatgaatcacaagaaatctcgagtgatggacttcttcaggagaattgataaagaccaggatgggaaaataacgcggcaggaatttattgatggaattctttcctcaaagtttccaaccagtcgcttggagatgagcgcagttgcagacatctttgacagagatggcgatggatatattgactactatgaatttgtagcagcccttcacccaaataaagatgcatataaacctatcacagatgccgacaaaatcgaagatgaggtgacaaggcaggtagctaagtgtaaatgtgcaaagcgatttcaagttgagcagattggtgataataaatacaggttcttcctgggaaatcagtttggagactcccagcaactgcgactggtccggatcctgcggagtactgtgatggttcgtgttggaggtggatggatggcacttgatgagttcttagtgaaaaatgatccttgcagggccaaaggaaggacaaacatggaactgcgtgagaagttcattttagcagatggtgccagccagggtatggctgctttccgaccccgaggccgaagatcccggccatcatcacgaggcgcttcacccaacagatccacttctgtgtccagtcaggctgcgcaggcggcctccccacaggtccctgccaccaccacacccaagattctccatcctttaacacgcaattatggtaaaccatggttgacaaacagcaaaatgtcaactccttgtaaagcagcagagtgctcagactttcccgtgccatctgcagagggaacgccaatacaaggaagcaagcttcgacttccaggatatttatcagggaaaggcttccactctggggaggacagtggcttgataacaactgcagctgccagannnnnnnnnnnnnnnnnnntgattccaagaagactcccagccgaccaggaagtcgagctggaagcaaagctggcagcagggccagcagccgccgaggcagtgatgcatcagactttgacatttcagaaatccagtccgtgtgctcagatgtggaaactgtcccccagacacacagacctacaccccgagcaggttctcggccatccacagcgaagccttcaaaaatccccacgccccagaggaaatcacctgccagcaaattggacaagtcctcaaagagatagtgcaattggttctaccaaggcccttccttgagcatttattatttaagtttgaacgatgtaaaatatggtgtagaaattcttgtgaaatattgcaagaggcgagtttaaaattctgcagatggccttatttgtgtatttgtctttttattttatctgtataattttttttgtcagatattctggggttaaagtcacatcatatgtgaggaggaaaagtttaacatgaactaacatttctgcactgtaacgtgccgggcacacactaaactcagttactgtacctacaggtaagtctacatcctctctgacagccacagcactacatcaatccctgacgttagggatacctcatgacattttcctgtttttatggaaactctgagaagctgaatgatacatgcaggggatattttttgagatgatttaaatgtaaaccaaaagatggaagacaaaaagacaaacacacccacacgcagtctttgcagtatctgacagagaactcacaggaagttacttcaagcacttgccagtactatgatattcaagtaccttgcagcatttctctgccattgctttcaatgaggccagaggcatcctggatattagacctattatactgtaagaatataagtataaagtgcgttcatatacatgtgaggttttcttttgcttgagtggacagtagcacctgtatcattgaactcattttgtatcagagcaattttgcttgcagaaagctatgaaataaaacacgtcccttaactgcattgctatggaattaattttttttccccagggaaaactagtgtatttttttatgagcaatatcaatttggagtgaccaaaagatacttaaaaatgggtttattttgatttctcatctgaaataatcatgttctggtattatatctatctatatttaataaatatatacattttaatttattatgtgtactcacatactatagaaagatattagtatgcatttaataaaacatattcacttgaaaaaaaaaaaaaaaagtagaagaggaaggaaattaaaaaaaaa

SEQ ID NO: 7691 - DNA, 5284 bp, Homo sapiens
  misc_feature (1243)..(1244): n is a, c, g, or t
  misc_feature (1246)..(1246): n is a, c, g, or t
  misc_feature (1260)..(1260): n is a, c, g, or t
  misc_feature (2095)..(2121): n is a, c, g, or t
  misc_feature (5236)..(5236): n is a, c, g, or t
ggcggcgggagagctgctggctcgcccggatcccgggagctgcctggaggcgggcccggcccggggaaggtgagcggctgcgggacccagcccctcgccgggagcgggcaccatggtgctgtcggtgcctgtgatcgcgctgggcgccacgctgggcacagccaccagcatcctcgcgttgtgcggggtcacctgcctgtgtcggcacatgcaccccaagaaggggctgctgccgcgggaccaggaccccgacctggagaaggcgaagcccagcttgctcgggtctgcacaacagttcaatgttaaaaagtccacggaacctgttcagccccgtgccctcctcaagttcccagacatctatggacccaggccagctgtgacggctccagaggtcatcaactatgcagactattcactgaggtctacggaggagcccactgcacctgccagcccccaacccccgaatgacagtcgcctcaagaggcaggtcacagaggagctgttcatcctccctcagaatggtgtggtggaggatgtctgtgtcatggagacctggaacccagagaaggctgccagttggaaccaggcccccaaactccactactgcctggactatgactgtcagaaggcagaattgtttgtgactcgcctggaagctgtgaccagcaaccacgacggaggctgtgactgctacgtccaagggagtgtggccaataggaccggctctgtggaggctcagacagccctaaagaagcggcagctgcacaccacctgggaggagggcctggtgctccccctggcggaggaggagctccccacagccaccctgacgctgaccttgaggacctgcgaccgcttctcccgtcacagcgtggccggggagctccgcctgggcctggacgggacatctgtgcctctaggggctgcccagtggggcgagctgaagacttcagcgaaggagccatctgcaggagctggagaggtcctactatccatcagctacctcccggctgccaaccgcctcctggtggtgctgattaaagccaagaacctccactctaaccagtccaaggagctcctggggaaggatgtctctgtcaaggtgaccttgaagcaccaggctcggaagctgaagaagaagcagactaaacgagctaagcacaagatcaaccccgtgtggaacgagatgatcatgtttgagctgcctgacgacctgctgcaggcctccagtgtggagctgganntnctgggccaggacgnttcagggcagagctgtgcgcttggccactgcagcctgggcctgcacacctcgggctctgagcgcagccactgggaggagatgctcaaaaaccctcgccggcagattgccatgtggcaccagctgcacctgtaaccagctgcccagctgcctcccttcttggacagccctgacccgtcctctgcaacctcctttctgtgcccctttcctcattctgacacccagaagacagtgacagatgtgtttgcaaggctgggatggctctctcatcatactcttgtttcttagaaataagcaagacagagcaggaaatggaatatgcgggtcacactgaggaatgcattttgctcatctgtgttattgaaggaggtgcttattaaatacagttcctatgcctgttttataggtggggttaggccagatgcagagaaagctaaatgtgggaatcatggatgcaaagaagaatttggctttttgaaaaacaagcatttcaaaaatgatgaaggaagtgaaagtatcctggatcaactcctagagttagagattgcccaggtggaaagaaaccttagccagcgttcaatcaagctcaccatgcagggcagtcacccggcagttctcaaactttagcatgtgaagagtcaccagcagattcctgggctcgcctggagacattcctagtcggtattcctggtcgaagcccaggagccttcctttttaacaagctgatgtagagggtggagcactgtatgtggagaaattccttctacaatattccacacaggtttttggccacagtccttgatggagtcccaaaaccatggtgcagccagttccaannnnnnnnnnnnnnnnnnnnnnnnnnnaatctggggcctcagctttttaatttaattattttaattcttaatactttaatttgtgcatttcataagccccctgctcttggactgaattttgtgctttttattgaagaattttattgtttttatcttaaaatcagtttctattatccttggggagaccatccctaacaaagtacaggtgggatctcctgtgagtcattggctgggttctgattgctagatgtcacacccaccagcatcaccaaagtgactctgagatagaccggtcccttctcagcgttccagtcacttcaggaggaatttagttattgacttagtctatgacatctggctacatgtaggtagagaagaaagacaattttaaaaaggaaatcaggtcttttgcaactgtgcctccctctgtctgttttcacttgaatgggtaaataaccagcagctaggttttgaattcctaccttgttattctaaacagatgtccacattgttaattaaatctaaattatgagccttgctgagtggatacggtacttacacctgaaccaggattcctgggttctgttgttgacattgcccttcagcacctgtttggccagctgtataagataggactaatgactaggaagcctaccccaatgaatgatatactagatgaaatagtgttcaaaacctgtaggcactctctggctaaaaacaaactctgaggccaccagcagatcatctttaagctaagttactatttttcacctttttttttagacggagttttgctctttgttgcccaggctggagtgcagtggcacgatctcggctcactgcaacctccgcctcccaagttcaagcgattctcctgtctcagcctcctgggtagctgggattacaggtgcccaccaacatgcctggctaatttttgtacttttagtagagatggggtttcaccatgttggccaggctggtcttcaactccagatctcaggtgatctaccctcctcggcctcccaaagtactgggattacaggcctgagccaccgcgcccggcctatttttcactttaatttggcagctgagaatgcccaaaaagtgccagaagcatcgtggcatttccagaaccatggattctgcctttggacccctctctattaatattaaaactctgggccttcagatgtcaccctaatccactgccctaagacagaatttctggacaagatgggtaagggcttcattccttcaacaagtcaagtcatacttggcctctccctgagaatctgagcaggagccttataacctgtggtcattattttttctttctgtacagaaatagaaaagcattagaaataacttctaaccatcctctgaaaaaacagaaaaaatatcgaatccctctttcatgagaagtcttttggataattggaaaccttcatcactgaggttggccagcccctgccaagtgttgtgtaggcaaagcacttgttagtggcttcctatgaaatgttttagagatctcttcaccatactggtttcttctctttggttggtgtgggtaaaagaaaacaaaacatttcctataagctgaaagctgaccagcattctcttcttggtaacatctactactccaacctagaaaatttggattctagaccaaaaatcaggaaacatggctccttataaatctgtgcagctgccttatagtaccatcaaaggaatttcaggtgggctgggcggggccccgatcccagaattatcaactccacccatcatcatttggtcatgaagcatcctttcattcttcttcttcttttttttggggggggcggggcgggggagggatctcaaagttttagtcttccagaatccaaattaaaggttgcccctgatgggggccaggttccgccacagaacatcttagatgtcagccttgacctcacttagcagggattacagaaatgagatacattttgaaggagagttgtctgttatgttcactgtattctaagtgcctgggataaagctgtctcatgggtgctccatatatattcatatatatttgttgagtgaattaatgaattaagagtggctggcagagtaggcagaaaaagacactgcaaatggcataaaaattaaagtcctagctgagttctcaatggtaaaggcatcagatgtcttagcagtcaagctagaaattcatgacaatgagtattactatttgcctaatgacaactcattgctctccatgtaaatgtaatcaacagatgaagagaatataattgctctgcttttccactaaaactccatcttagtgaattttaaattatccagagatgtcaaactgccaaataaaaatatttcagtagtctttgcatcagcttaccttgtaccagaaacatttccaatttactatcaaattatagtaactgagcctgtgtgaagtatctcatcattttcgaaaggaacaccttgtgtgatgccagtgagcatttctaaaaagggtgtgaggtagaggtaaaaataaggtgagagaccatttcagaatgcactgttgctcaaaaaggtgatctggttctttcttcagagatttctacggggatagaaaatcgggagtctgccctcattaatctgtgactccacctcttgcatcaaatcaatatctatttgttgagcacttattgattaagaccttgcatatgtctgtccattttgatttgagatacaactttttgtgtgggttgaatgacaaatcactccaaacaaaactgggcacagagaatcagctaggagaccagttattcagggtccatttctcttggatgtaaaggagtcctgggtaaaatgtggctgtaacctaaaccaactagtccttgtgatttgtttctgccctctgtgtttcctgttgtcaaatgctaagtgtgtgttttgcagtcatgaactaaagcacaaaaagatgcatgagacattgtagtcatatgtctggtgtgacactttggagcaaaaaccttgcagtggtaaataaaaaatttccaacagggaaaaaaaaaaaaaaaaaaaaaaaaaaacgttttacctaatattttggcatataaaatgcagaagaaatcatctgataagcacttatgagccnctgccatgtttaataaaacttgacaactacaaaaaaaaaaaaaaaaaa

SEQ ID NO: 7692 - DNA, 2193 bp, Homo sapiens
aacgagtgagaagcgagcgagggaacggcacgaggcgcggagcatgcggagcggcgccccgggcggcccccgggcttgggcgagggcttgggccaggcgcgcgggccgttggggttcggagcttcgtgggacccgcggccggcgcggggacgtacggcagtgactcggggctcaccgggggccagtgccgggccagggggccagccccgcccgcgtctcggcccggacggcccggcgaggaagctcccatgcgggaccgcgcggcccggtgagggcgcgcgcgggcgggcggggacgcagccggcaccatgtccatgctgcccaccttcggcttcacgcaggagcaagtggcgtgcgtgtgcgaggtgctgcagcagggcggcaacatcgagcggctgggccgcttcctgtggtcgctgcccgcctgcgagcaccttcacaagaatgaaagcgtgctcaaggccaaggccgtggtggccttccaccgcggcaacttccgcgagctctacaagatcctggagagccaccagttctcgccgcacaaccacgccaagctgcagcagctgtggctcaaggcacactacatcgaggcggagaagctgcgcggccgacccctgggcgccgtgggcaaataccgcgtgcgccgcaaattcccgctgccgcgctccatctgggacggcgaggagaccagctactgcttcaaggaaaagagtcgcagcgtgctgcgcgagtggtacgcgcacaacccctacccttcaccccgcgagaagcgtgagctggcggaggccacgggcctcaccaccacacaggtcagcaactggttcaagaaccggcggcagcgcgaccgggcggccgaggccaaggaaagggagaacaacgagaactccaattctaacagccacaacccgctgaatggcagcggcaagtcggtgttaggcagctcggaggatgagaagactccatcggggacgccagaccactcatcatccagccccgcactgctcctcagcccgccgccccctgggctgccgtccctgcacagcctgggccaccctccgggccccagcgcagtgccagtgccggtgccaggcggaggtggagcggacccactgcaacaccaccatggcctgcaggactccatcctcaaccccatgtcagccaacctcgtggacctgggctcctagaacccatttgccttgatgagcttgccttttgtgacttgacactggggacgtggagtggcggtgtccaggggcgccccgcccctgcggccccaccaggtactgaaagacccgcaggctgagcgggtagaacagccgggtagggcagatagctgtctatgttggttcttgtttgggatttattttcaacaagttacttttaggatccttttggggctggagactgagtcttgaaccacagaagggaataaattatacaccactgtcattctctctctccctctgtctcttccttttaccctctcttgtcttgccttttccccctttcctcttcctttcccttccttctcttttcttttttctgctttctgtctttctccctctccttgtattgctttccttctagatttctagcttgccaccgttcattctctccttctgtctctccctttctctctccttctctgtttctcctctcttctctcctgccagtctcttgtactctgtgtcctggtccctccgtatgtacccctgtctttctcctcctgactggtggtctatctgcccctacctctggccctcgctttaccggagtagggggtgggagagggaagaggagagaaaagacagggactttgaacctaggccatctcctgaggccttttccctcgcccatgtgggtcagtgggagctgcaggtgtcagcttttcgtctagtaacttaagtgagagagaaagggcagcgccacagaagcccctaaacgccgcctcgtcatacgcccctcctccttctctcttggcgaggccccgccacaccgcgctcttcctcccgggactgtgactacagcgctcccggctgagcgcgccccccgagccgccgacttgccgtctccccgtaatgccctcatgtgaatgttcttcgggaaatatttctgcttttattttataataaaattagaaatcataaataaaaaaaaaaaaaaaaaaaaaaagataaaaaaaaaaaaaaaaaa

SEQ ID NO: 7693 - DNA, 5634 bp, Homo sapiens
  misc_feature (1063)..(1078): n is a, c, g, or t
  misc_feature (2096)..(2134): n is a, c, g, or t
ctctgccaaatccacctcctgaggagatttccacaggaactcaatccacattcagcacaatgggcacagtttccaggagaaggatctgcagaaccaacacaatggcacgagccaagattctccaggacatagacagagagcttgatcttgtggaaagggagtctgcaaaacttcgaaagaaacaagcagagcttgatgaagaagaaaaggagattgatgctaagctacgatacctggaaatgggaattaacaggaggaaagaggccctattaaaggagagagaaaagagagaacgagcctacctccagggagtagctgaggatcgtgattacatgtctgacagtgaagtgagtagcacaagaccaacccgaatagaaagtcagcatggcattgagcgaccaagaactgctccccaaactgaattcagccagtttataccaccacaaacccaaacagaatctcaactagttcctccgacaagtccttacacacaataccagtactcttcccctgctcttcctacccaagcacccacctcatacactcaacagtctcattttgagcaacaaactttgtaccatcagcaagtttcaccttatcagactcagccaacattccaagctgtggcaacaatgtccttcacacctcaagttcaacctacaccaaccccacagccttcttatcagttaccttcacagatgatggtgatacaacagaagccacggcaaactacattatatttggagcccaagataacctcaaactatgaagtgattcgcaaccaaccccttatgatagcacctgtttctacggataacacatttgctgtttcccatcttggtagtaagtacaatagtttagacttgagaataggtttggaggaaagaagtagcatggcaagcagtccaatatcaagcatatctgcagattctttctatgcagatattgatcaccatactccacgaaattatgtcctaattgacgacattggagagatcaccaaaggaacagcggcattaagcaccgcatttagccttcatgaaaaggatctgtcaaaaacagnnnnnnnnnnnnnnnncactgagacacgccggtctcaagaagtgacagatttcctagcacctttacagtcttcctctagattgcatagttatgtgaaggcggaggaagacccaatggaggatccttacgagttaaagcttctgaaacatcagattaaacaggaatttcgtagagggacagagagcttagatcaccttgctggtctttctcattattaccatgctgatactagctacagacattttccaaaatctgagaagtatagcatcagtagactcacacttgaaaaacaagcagcaaaacaactgccagcagccatactttatcaaaagcagtcaaagcataagaaatcactaattgaccctaaaatgtcaaaattttcacctattcaagaaagtagagaccttgaacctgattattcaagctatatgacttctagcacttcatctattggtggcatttcctccagggcaaggctccttcaagatgacatcacttttggcctcagaaaaaatattacagaccaacaaaaatttatgggatcttctcttggcacaggactgggcacattaggaaataccatacgctcagctctgcaggatgaagcggataagccatacagtagtggcagcaggtccagaccttcctccagaccttcctctgtctatgggcttgatttatcaattaaaagggattcttctagctcttccctaagactgaaagctcaagaggctgaagctctagatgtttcctttagtcatgcatcatcctctgccagaactaagccgaccagtttgccaattagtcaaagtagaggaagaataccaattgtggcccagaattctgaagaagaaagcccactcagtcctgttggccagccaatgggaatggccagggctgcagctggacccctgccaccaatatctgcagacaccagggatcagtttggatcaagccactcattgcctgaagttcagcaacacatgagggaagaatcacggactcgaggctatgaccgtgacatagcattcatnnnnnnnnnnnnnnnnnnnnnnnnnnnnnnnnnnnnnnnctatcatctgcgtcgtgaggaaacagattggtttgataaacccagggagtctcgtttggaaaatggacatggtctggaccgaaaactgccggaaagattggtccactctagaccactcagtcaacatcaagagcaaattatacagatgaacgggaaaactatgcactacatctttcctcacgcaaggataaaaataacaagatgactcaaaggctttcacacagtttcactgtaatggattaggaattagaattgtgggtggtaaagaaatcccgggacatagtggagaaattggagcctatattgccaagattcttcctgggggaagtgcggaacagacggggaagcttatggaagggatgcaagtattggaatggaatggaattcccttgacttctaaaacatatgaagaagttcagagtatcattagtcagcaaagtggggaagcagaaatatgtgtagactggacctcaatatgctatcagattctgaaaattcccagcatctggaacttcatgagccaccaaaagctgtggataaggcgaaatccccaggggttgatcctaagcagttggcagcagaactccagaaggtttcactacagcagtcaccgctggttctgtcatcagttgttgaaaaaggatctcatgttcattcaggtcctacatcagcaggatccagttccgttcccagccctgggcaaccagggtccccctcagtgagcaaaaagaagcacggcagcagcaagcctaccgatggaacaaaggttgtctctcatccaattacaggagaaattcagcttcaaattaactatgatcttggaaatctcataatacatattctccaagcaagaaatcttgttcctcgagacaacaatggttattctgacccttttgtgaaagtgtaccttcttccagggaggaaggtgctgaagtacaagagaaggactaaacatgtccagaaaagtcttaatcctgagtggaatcaaacagtaatttataaaagtatttccatggaacagctcaagaagaaaacactggaggtgacagtttgggattatgatagattttcatccaacgacttccttggggaggtattgattgatttatctagcacagctcacctcgataacactccaaggtggtatcctctcaaagaacagactgaaagcattgatcatggcaagtctcattccagtcagagcagccagcagtccccaaagccatctgttatcaaaagcagaagccatggtatcttccctgacccatcaaaggacatgcaggttcccaccattgagaaatcccatagtagtcctggtagctcaaaatcatcatcagaaggccatctccgttctcatggaccatctcgcagtcaaagcaaaaccagcgtcactcagacccacctggaagatgcaggggctgccatagctgctgccgaagctgccgtgcaacaactccgcattcaaccaagtaaaagacgcaaataaattcctcagcatggcagcttaatgttcatctgttgcctttctttcctgctgtcctttcctgtttgctttcagttttcaacatcctctgctcaccctgttctctgtccctttgtctgtgtaagaacgatataaatacattaatatgctctttcttatttagattttttttatttacatagactgaaataaaactggctgtttctcctttgtttccaccatccatccaacctggctcatagcatttgatacagtgtctgtgatgtttggaagcaaagcaatgttgtgtgtcctttttgtttgcgcttaaatatcttttagaatacagaaattataagcacaagtggctgccagttttccaggacttataccaaaaaaaaaaaagtgcacacatataagtatttagagcagatttgcaattagattcttgtatctgaaaacactcaaaaagtctaggcagaagataatgcaaccaacagtcaacttctagaaccttggaggaaaagccatttcaagacagtgctttaaaacactaacaaattttgcttctgaaatatggtagctttccatgtgcaaaaaattgtagtcttctgaaaaatctgtgaagaaaatcttatttcttacattctcaaaaaactacattaaattaatatatgtataagcatatgtgataaggcaatgcaacctcactgaggagcacaattgggtccattctgttggatcacactttgtatgtgatgacagattttacagatattttttctaaccattggaaatcaagatatactatgtctggtagctataagtcaatcaaattataacaattgacctatcttaactgctgtattttcatttcatttgtgaaaatttagtcgattgatataattatataaaaacttaatatgtgcaaatatttcacaaatgtaggtaccctgttacttctaaaaggcattagccaggcaatggagatagatcattgttctctccatctccctagtcatcattttcaaagaaacagccagttttaaacccctttagtgctgtgcatgtggtgtcattttggcatttgaaaacacaacctatttaaatagagcaaaagagcacttctgtttgcatgaataacatttaagctggttccatctgaggatacatactctgggtttccatttcacccacactgccacagcagcacataaaagcggtcagtctaatcatgccaggaagcagcacagacacagcatagcaggagtcctccccattcaaagaactcagtctgataatctgcctccaccagccaatggcaaccaagaccaaagccagctagccctcaggaaggtgatgtctgatggaccagtcaagccagaaggaggtgagcagaaaggccctgttcaaagcacacagcaagaacatccccaaatttaaagctctcatctttaatttttagagattgtctgataaaatatgtttatccactttttaatgtgcttttgtgggcatggcatttcaggacttcatcatcaccatgtaagtcccaagatcagtcccgtaatatattgactacagtgatttgtatttttctatgcactgggcatcttttgacttttgttgggaaatagattaacaatattcatattgcagaatggaatgcatgctactaacctaatctgttcaagcatgactataaatatgtttcattgtgataaaagtttaaattgctcacagttcaagttagcctaccagttggaatgtggatcagtgttttttgcctattatttcaagtgtaacttttaaaaatttagtggattttgaaaattcttagaggaaagtaaaggaaaaattgttaatgcactcatttacctttacatggtgaaagttctctcttgatcctacaaacagacattttccactcgtgtttccatagttgttaagtgtatcagatgtgttgggcatgtgaatctccaagtgcctgtgtaataaataaagtatctttatttcattcataaaaaaaaaaaaaaaa

SEQ ID NO: 7694 - DNA, 2999 bp, Homo sapiens
ctacccttcaaggccatctccgaggggcacctggaggccccactgcctcggtccccctcccgggccagctcaaggagggcgtcctccatcgccaccacctcctatgcccaagaccaagaagcccccagagattacctcatcctggccgtcgtcgcctgcttctgccccgtctggcccctcaacctcatccccctcatcatttccatcatgtctcgaagcagcatgcaacagggcaacgtggacggcgcccggaggctgggccgcctggctcggctgctcagcattaccctcatcatcatgggcatcgtcattatcatggtggccgtgaccgtcaacttcacagttcagaagaaataaacttaagcagggagctgggctagcagaggccggccctggccatcgggagagctctgacctgcacaccgcgggaggccagggtgctgactgtcaagcatcccctgtccccaagttccaaaagcacagactcaaagggaaaccccccagtcacccactgtcagctcccatctgacaagaaagcctggagcgaggaaggaaagcacagcgaacccaatgggtaacgtggtttactctcccggacgcgtcctgggatctcaaccccagcagtctggcttgtttctcattcccacaatttcctgggttccaccaagcagcgaaaactgccaggatgaatgaggaaaaaacccagccccacaaacgagacacacgctggcggggagagacgcagcagagctccttcctgtctgtggactcggagcaaagacgtggggccccatcttttgtgttttcctcaagcggggaaagaatggactgtttgcatgcttcctgccacacgcccgcggtgatcccagccagggccccgagcgcagaggcggagctgtgctcagcacaggcctgggacctcccccggcaggcacctgtggggggtgcagctcccgggaaggaggcaactgcctcacttaacatcctccgctgcaaggtggtggcgccgagaggcgtgtctgtgaagacaggtaccaggatggcaggacccgcacgcctcttcccacacctgtcagcttcggaagcatctctcgaggactctggtcccaggatgtctcccaggacaagccagtctgcctcttcctcctacttctgctgtagcctgggaccagacctggccaaggtcagccagcggggagggccgaggtctgagctctcgtcctgccgtggcccccgcgatggcctggggtgcaagcttggggctccgtctggtgctgcttaggtagtttcaggcttccagcccagccctatgctctgtgcttggccctgggcccctggccatccacaaacagcagaggccttccctggaggaggctttgggaccacccctggggggacttcccaaagggtcccaggctgtcaggggcgtttgcgccacctgcaagggcgtgggtcagagagtttttatgggggtctgttgtttgaccgtcctgagaccgagggaagggctcagctgaaggaccccgtctgcaggagagtcgggggaccaggtttgggaatacacttgcatgtacagagcctggggcctggacgccacggcctctcatcttaggacctaatgggacccccgaaaggagccaagtggggccctcggcctcttccttcgttccaggcccatgattttccctacacttctccctggcccaggctccagccacaggcacctctcctgcccccgcccaccctcctgaccgcagctcccaggccctggagacctccaggctttcctgccctgggcagccccacctcacagccagagtcaatgccttcatgggaagggctcccagccacacccagagtggcccaaagctgttgaagtcagcatcctttgtcccatcaggaccctcctgcctcctctccaggcccttgttcgcctccccaccctcctcagaggcacagcccgtgtgactgctagagggcaggggtgcagggctcagggggcccgggctggtcctttggggctggtgttcctacgtcagtccccacctggggaataaactccagcctctcctgctcatacagaagggactggttgggtttgctttatgggatctttgagaccaaaacagatgctcctgtttgctgggggagggtgtgagcacggagtatttctgtccctcgtgaagtcacgtcacacaggggagaggcgaggtcgatggaactggccacgcacaggctctggctctggaaggagggatgatgagtgggcgttttcccggcaggcccccggggtcctcagcctcagcaacccagggagaggacagaaacgaaccgatggttgagggattgtcacgggaggaacatgacacccgaagggactctatgtgccctcggagtgccacacatgcccagaccttctcacacccacacaaataggctctgccgtgcactcctacacacacacacacacacacacacgcttgttcacactcagaacccaggacagccacagccaccgcttaggggaagccactgcagatgcccctggaatgggcacagcacagccagggcgctcttccaggcaggcgaggataacttgagagtttcctagggcaccagggacagagctcagaggcccccgaggtgtgtgtaggaggcggaggcccgcagagcacagagcaggagaagggcttgggccctggaggagaaagccattctggacaccaggggacctggacggagggtccccacagcccgtgccccacgccgcctggaggccagaggggtcagtggccctgctgtcccggctccatcttggttctagccgccacctgcatgaacacagtggcccggcttaacgcactaacccagcctctccctgtgtcccacagggagtagcaagacccaccccacactgccttcaccatctacaccagtgacgccgctgtgtgtcttagcatggaaataaataaacctgaatgtaaaaaaaaaaaaaaaaa

SEQ ID NO: 7695 - DNA, 2556 bp, Homo sapiens
agcggatgggcataagcaactcacactggttagcttttgtcagatttcgtcgtttccgcagcaaaatttcttagtgttgatgttgatagcttctgggttggcaaactggcagttcactctagtcttactgggttgggcaagtccttgcccctagaaaattggggatagctttggccatgggaggagcaagaacactacgcagtcgtaagctctgttttttgttttgttttgttttgttttgttttcggcaccattatgtacgatgaagacttacagccacagcataggggacactttgaggagccctagtatcattgtttgaaatcattgtacagggaactgcaggggtgaacaccattgtaccaatccccgggccagtgtctcatttcctaacagaatcatcccattcttgttcactcttcagtcatcccaagccaaaagggaaaattcgaaacccactgtgacaccccaaccctaatttccaacctttggaggactcacctggggcagaagggagaaagggctttgctgaagtctcaggctgccgagagccatgtatgggcataggagcaagctgatggcatggctcttgacaaggttttctatagggcagcagctgctgctcccaggggaaccctctcctgttgcctccgcagtctattctggggtggaaacaccattctctattatttctctcacatacatgtggatttctaatatcaagttatgtgactgcctaccacttaaggcctacaaaaccacatgggagtttctttattgcgtatgcagccagtcaacatgaatgggaccctagaaactgtgaggagcaggattctctaaggtgctcttagatacggtgtcacttccacatacaagcacaattctcccagttaaggggctggaagacaagcggggcaactggttttgaaaagcccgctggcgtgccagagggggtgtttgcccacaccctccttgaatttaactgccacaatctatccgcagatgtgttttgttctgtttcttgtttttcactagcgtttgcgttgcttcctctgaagccagagggtgaaaggccctagcaaagttagttatcagtcaactgatgataactgtgatccttaaagatgaattcccagcctgaggtgacacacagaggttcagcagacgtctcaggatctgtcacatgtcatgttgcttggtgtgaagatggaagaacaaagtccacatcagtttctgctccttcaaacagtgtgtcgatatgaaacattgagatttggcagaaacatgtgcctagtttgcagcaccaaatactggtcttctcagaagtgtttctgtttttttgtttttgtttttgtttttgtttttgttttttgtttaatttcctcttctggcatcccaatttggatcatttcctctctttctttcctggagaaacaggatggcaggtgctggagcccagagagggggttaccctccagctaaaatgatttaaatggaaaggagaatgacagcaaagcctcacgtgaactttaatgaccttatcaatgacctttactaactgacttttggtacccggattgttgagaggtgagtgggactaaaagccaggatcaagatcaggttgctccacacatttgcagatcaggagccccgggaatgtgagttagacccagaaagtattgaactggacattgaatgaagcttgaggccatgcattgataacatttttagagtctgttacattattttctcaaaaggaacacatgtttactacaaaccatttagaaaataccaataaccaaacagaagggaaatgtctggaaccttccagttgtttaattctgtagaaactgttcacgaaaggctgaatgagtggggacaagtcacagagatctcgccatggttagcaccagggacaagtctggctctaatgtatgttttatgaagtctgattagctttgaaatgcatctttgccagctgaacttgtcatgcactaaacttcccattgatcattagagtgtctacgattaagtggaaaaggtggtcaaccatttggatgtttgactttcacaacatcaagcattggccattgggcgtatctgggcattggtatggaataaacaggatactcagtgaaacatccaaactattgactggatttttcccatggggcatctgtctaagagtcacagatctgagaaatagaaggaccaggtccgtgtggatgctcctagtgcgttcaaataacccttgaattcaccaggtctcattgcatttatttaaagatggagcccattgtcccccctcctcctcagctcacccatggaactagaaattcacaaacctgaagctgaaccacaggacaagaaattaaacagcaacggccacatggcctcttttttcacaggttttgcattgaatgttttagaactttattcccccgccccctcacccatgtataccaaaactggttttattttcattttcctaaattattttctgatacaataaactgttaactgtttatttatacttttaaaaaaaaaaaaaaaaaa

SEQ ID NO: 7696 - DNA, 4449 bp, Homo sapiens
  misc_feature (2518)..(2545): n is a, c, g, or t
  misc_feature (4330)..(4351): n is a, c, g, or t
tgctgttacggtctggaatttttgggatggcggcgctggcagtaatgaggcggcggcgggcgggtactggcttctggggccaggggccaggggcggtgggcgccgggaccgcggagctgaggagcggggcccggccagggctggagactttgcgcccgggggcaccggggctgcgcgcggtcgcacacatccaccggcgcggcttccctcggcggcccgggctccgctcatcctgcggcgggcggcgccgctcaggggcgggaagaggaggcggtagacgcgaccacagaagatgtcgggccaaacgctcacggatcggatcgccgccgctcagtacagcgttacaggctctgctgtagcaagagcggtctgcaaagccactactcatgaagtaatgggccccaagaaaaagcacctggactatttgatccaggctaccaacgagaccaatgttaatattcctcagatggccgacactctctttgagcgggcaacaaacagtagctgggtggttgtgtttaaggctttagtgacaacacatcatctcatggtgcatggaaatgagagatttattcaatatttggcttctagaaatacactattcaatctcagcaattttttggacaaaagtggatcccatggttatgatatgtctaccttcataaggcgctatagtagatatttgaatgaaaaggctttttcttacagacagatggcctttgattttgccagggtgaagaaaggggccgatggtgtaatgaggacaatggctcccgaaaagctgctaaagagtatgccaatactacagggacaaattgatgcactgcttgaatttgatgtgcatccaaatgaactaacaaatggtgtcataaatgcagcatttatgcttcttttcaaagatcttatcaaactttttgcttgctacaatgatggtgttattaacttactcgaaaagttttttgaaatgaagaaaggacaatgtaaagatgctctagaaatttacaaacgatttctaactagaatgacacgagtgtctgaatttctcaaggttgcagagcaagttggtattgataaaggtgacattcctgacctcacacaggctcccagcagtcttatggagacgcttgaacagcatctaaatacattagaaggaaagaaacctggaaacaatgaaggatctggtgctccctctccattaagtaagtcttctccagccacaactgttacgtctcctaattctacaccagctaaaactattgacacatccccaccggttgatttatttgcaactgcatctgcggctgtcccagtcagcacttctaaaccatctagtgatctcctggacctccagccagacttttcctctggaggggcagcagcagccgcagcaccagcaccaccaccacctgctggaggagccactgcatggggagaccttttgggagaggattctttggctgcactttcctctgttccctctgaagcacagatttcagatccatttgcaccagaacctacccctcctactacaactgctgaaattgcaactgcctcagcttctgcctccactactacaactgttactgctgtcactgctgaagtggatctctttggagatgcctttgcagcttctcctggggaggcccctgcagcatccgaaggggccgccgcaccagctaccccaacccctgtagcagcagcacttgatgcatgttcaggaaatgacccctttgccccgtctgaaggtagtgcagaggctgcacctgagctggacctctttgcaatgaagccacctgagaccagtgttcctgtagttacccctacagctagcacagcccctccggttcccgcaactgctccttctcctgctcctgccgttgcagctgctgctgctgccactactgctgccaccgccgctgccaccaccactaccaccacctccgctgccaccgccaccactgctcctcctgctctagatatctttggtgatttatttgagtccactcctgaagttgctgcagcgcctaagccagatgctgctcctagcatagacctgtttagtacagatgctttctcctctccaccacaaggggcctctcctgtgcctgagagttctctcactgctgacctcttatctgtggatgcatttgcagcaccatctcctgcaaccactgcctcgccagcaaaggtggattcttcaggtgtcatagacctttttggggatgcatttggaagtagcgcttctgaaccccaacctgcatctcaggctgcttctagttcatcagcatcggcagacctactagctggatttgggggttctttcatggcgccttccccatctccagtgactccagctcagaataacctgctacagcccaattttgaggcagcttttgggacaacgccttcaacttccagcagcagctcctttgatccatcagtgtttgatggtctaggtgatcttttgatgccaaccatggcaccagctgggcagcctgcacctgtctcaatggtaccnnnnnnnnnnnnnnnnnnnnnnnnnnnngcccttggaagtgatcttgattcatctcttgccagcttagtaggcaatcttggaatttctggtaccacaacaaaaaagggagatcttcagtggaatgctggagagaaaaagttgactggtggagccaactggcagcctaaagtagctccagcaacctggtcagcaggcgttccaccaagtgcacctttgcaaggagctgtacctccaaccagttcagttcctcctgttgccggggccccatcggttggacaacctggagcaggatttggaatgcctcctgctgggacaggcatgcccatgatgcctcagcagccggtcatgtttgcacagcccatgatgaggcccccctttggagctgccgctgtacctggcacgcagctttctccaagccctacacctgccagtcagagtcccaagaaacctccagcaaaggacccattagcggatcttaacatcaaggatttcttgtaaacaatttaagctgcaatatttgtgactgaataggaaaataaatgagtttggagacttcaaataagattgatgctgagtttcaaagggagccaccagtaccaaacccaatacttactcataacttctcttccaaaatgtgtaacacagccgtgaaagtgaacattaggaatatgtactaccttagctgttatccctactcttgaaattgtagtgtatttggattatttgtgtattgtacgatgtaaacaatgaatggatgttactgatgccgttagtgcttttttggacttcacctgaggacagatgatgcagctgttgtgtggcgagctatttggaaagacgtctgtgtttttgaaggtttcaatgtacatataacttttgaacaaaccccaaactcttcccataaattatcttttcttctgtatctctgttacaagcgtagtgtgataataccagataataaggaaaacactcataaatatacaaaactttttcagtgtggagtacatttttccaatcacaggaacttcaactgttgtgagaaatgtttatttttgtggcactgtatatgttaagaaattttattttaaaaaatataaaggttaacgtccataataaatacttctctttgaagctaccttatcaagaacgaaaaatcgtatgggaagaatcccctatttatcactgctatattaaaatatatatattttaattatatttgacaggttttgcatctaaattgacctatttattcattcttgattaaatgcactgaaaagtaaagggtctgtttgtgtcatgttcatgaaaatgcggttagagaggtgctattcaagtgattctgaaggcaccccaaggtatatctgtaatttaaagattactgcaaatatctttactttactgtgggtttttagtacatctgttaatttagtgtttctttgtgtgttttgtagactagtgttcttccatccttcaactgagctcaaagtaggttttgttgtaacattgtgattaggatttaaactaattcagagaattgtatcttttactgtacatactgtattctttaagttttaatttgttgtcatactgtctgtgctgatggcttggcttaagattttgatgcataaatgaggtcactgttgatcagtgttgctagtagcttggcagctcttcataaaagcatattgggttggaaaggtgtttgcctatttttcaaattatttaatagatgtatggtaccatttaaaagtggttgtatctgaatttactgtggggataacatacactgtaatggggaaaaattacctaaannnnnnnnnnnnnnnnnnnnnntttgtatttcagtttaaaaacccagtgcatgtacgccctctgagatgcaataaacaccttgaacaaagaaatgcaaaaaaaaaaaaaaaaaaaaggac

SEQ ID NO: 7697 - DNA, 6416 bp, Homo sapiens
  misc_feature (2465)..(2502): n is a, c, g, or t
acggctgcgagaagacgacagaagggggccactgcagctggcattggccgggactggaagtgcgggcttctgcagcagccgaagctggagctgctagggcagcagcggctcccctgttgtatggacattctgcacccgaaactgatagctgagtcctgaagttttatgttatgaaacagaagaactttcatcccagcacatgatttgggaattacactttgtgacatggatgaatctgcactgacccttggtacaatagatgtttcttatctgccacattcatcagaatacagtgttggtcgatgtaagcacacaagtgaggaatggggtgagtgtggctttagacccaccatcttcagatctgcaactttaaaatggaaagaaagcctaatgagtcggaaaaggccatttgttggaagatgttgttactcctgcactccccagagctgggacaaatttttcaaccccagtatcccgtctttgggtttgcggaatgttatttatatcaatgaaactcacacaagacaccgcggatggcttgcaagacgcctttcttacgttctttttattcaagagcgagatgtgcataagggcatgtttgccaccaatgtgactgaaaaatgtgctgaacagcagtagagtacaagaggaattgcagaagtggctgctgaattaaaccctgatggttctgcccagcagcaatcaaaagccgttaacaaagtgaaaaagaaagctaaaaggattcttcaagaaatggttgccactgtctcaccggcaatgatcagactgactgggtgggtgctgctaaaactgttcaacagcttcttttggaacattcaaattcacaaaggtcaacttgagatggttaaagctgcaactgagacgaatttgccgcttctgtttctaccagttcatagatcccatattgactatctgctgctcactttcattctcttctgccataacatcaaagcaccatacattgcttcaggcaataatctcaacatcccaatcttcagtaccttgatccataagcttgggggcttcttcatacgacgaaggctcgatgaaacaccagatggacggaaagatgttctctatagagctttgctccatgggcatatagttgaattacttcgacagcagcaattcttggagatcttcctggaaggcacacgttctaggagtggaaaaacctcttgtgctcgggcaggacttttgtcagttgtggtagatactctgtctaccaatgtcatcccagacatcttgataatacctgttggaatctcctatgatcgcattatcgaaggtcactacaatggtgaacaactgggcaaacctaagaagaatgagagcctgtggagtgtagcaagaggtgttattagaatgttacgaaaaaactatggttgtgtccgagtggattttgcacagccattttccttaaaggaatatttagaaagccaaagtcagaaaccggtgtctgctctactttccctggagcaagcgttgttaccagctatacttccttcaagacccagtgatgctgctgatgaaggtagagacacgtccattaatgagtccagaaatgcaacagatgaatccctacgaaggaggttgattgcaaatctggctgagcatattctattcactgctagcaagtcctgtgccattatgtccacacacattgtggcttgcctgctcctctacagacacaggcagggaattgatctctccacattggtcgaagacttctttgtgatgaaagaggaagtcctggctcgtgattttgacctggggttctcaggaaattcagaagatgtagtaatgcatgccatacagctgctgggaaattgtgtcacaatcacccacactagcaggaacgatgagttttttatcacccccagcacaactgtcccatcagtcttcgaactcaacttctacagcaatggggtacttcatgtctttatcatggaggccatcatagcttgcagcctttatgcagttctgaacaagaggggactggggggtcccactagcaccccacctaacctgatcagccaggagcagctggtgcggaaggcggccagcctgtgctaccttctctccaatgaaggcaccatctcactgccttgccagacattttaccaagtctgccatgaaacagtaggaaagtttatccagtatggcattcttacagtggcagagcacgatgaccaggaagatatcagtcctagtcttgctgagcagcagtgggacaagaagcttcctgaacctttgtcttggagaagtgatgaagaagatgaagacagtgactttggggaggaacagcgagattgctacctgaaggtgagccaatccaaggagcaccagcagtttatcaccttcttacagagactccttgggcctttgctggaggcctacagctctgctgccatctttgttcacaacttcagtggtcctgttcnnnnnnnnnnnnnnnnnnnnnnnnnnnnnnnnnnnnnnataaccagaacagaaagaaatgttgcagtatatgctgagagtgccacatattgtcttgtgaagaatgctgtgaaaatgtttaaggatattggggttttcaaggagaccaaacaaaagagagtgtctgttttagaactgagcagcacttttctacctcaatgcaaccgacaaaaacttctagaatatattctgagttttgtggtgctgtaggtaacgtgtggcactgctggcaaatgaaggtcatgagatgagttccttgtaggtaccagcttctggctcaagagttgaaggtgccgtcgcagggtcaggcctgccctgtcccgaagtgatctcctggaagacaagtgccttctccctccatggatctgtgatcttcccagctctgcatcaacacagcagcctgcagataacacttggggggacctcagcctctattcgcaactcataatccgtagactacaagatgaaatctcaataaattatttttgagtttattaaagattgacattttaagtacaacttttaaggactaattactgtgatggacacagaaatgtagctgtgttctggaactgaatcttacatggtatacttagtgctgctgggtaatttgttggtatattatctggttagtggttaatgcttcctttaaaaataattgagtcatccattcactctttttcagttttatctgtcaatagtagctacatttttaatgggagcaccttttatcccaaagtgctttataaattgagtggactgatatatatcacacccaggtatcactgtgctgtcctttgctgtcagatttagaaatgtttttaagagctatgtgaaaacagacaatattagtttaggtcgggaactgagatattgtaatcaaatagttaacatcaggaagttaatttggctggcaaaattctagggaaacttggccagaaaactggtgttgaaggcttttgctcatataaacaagtgccattgagtttcaaatgaccagcaaatatatttagaacccttcctgttttatgtctgtacctcgtccacccctcaggtaatacctgcctctcacaggtacagctgtttcttggaaatcctccaaccaaatagcagttttcctaacttgattagcttgagctgacagactgttagaatacagttctctggccacagctgatgagggctttctgtactgcacacagattgtgtactgcaccccagtccaggtgactggtacccactcgagttgtgccgtgcacaacctgtccagtatatgcatgtggtggccctactgactggtaatggttagaggcatttatggatttttagctttgaggaaaaaccatgacttttaacaaatttttatgggttatatgcctaaacccttatgccacatagtggtaaataattatgaaaaatggtctgttcataattggtaggtgccttttgtgagcagggagcataattattggtttattatggtaattatggtgattttttaaatatcatgtaatgttaaaacgttttctaacagtttactgttgcttatctccaagatattatggaattaagaatttttccagatgagtgttacatagattctttgaatttagtataaaagtactgagaattaagtttgtacttccataagcttggattttaaacactgatagtatctcatgagtaatgtgtgttttgggagagggagggatgctgattgatatttcacattgtatgaaataccatgtttgaaactcatagcaataatgctatgctgttgtgatccctctcaagttctgcatttaaaatatattttttctttataggaattgatgtataccatgaagtcattgtcagttgtagtagctctgatgttgaatgagatatcatgttttagcattccattttactgactagggtagaagaacacttttcttggctacatttggaggatacccagggagtcttgggtgttccttatctggggaagcaaacatttcactagtctctttttttcatcctttaaattgtaaattaaggattactcaagctcaccattattcaagattgggactcgcttcccagtcgacactctgccctgcctgtcattgctgcaaagagctgctgctttgccaacctaagcaaagaaaatacggcttctcttgcattattttcccttttggttggtttgttttctagaagtacgttcagatgctttggggaatgcaatgtatgatttgctagctctctcaccacttaactcactgtgaggataaatatgcatgctttttgtaattaactggtgctttgaaaatcttttttaagggagaaaaatctcaaccaaagttatgctcatccagacaagctgacctttgagttaatttcagcacaactcattcttcagtgcctcatgactgaaaacaaaaaacaaaaaaacgaaagcatcttcacaatgaagcttccagatagcaccgttttgctaaaagatacattctcattgttttccaacagtgatggcttccacataaggttaaacaaactaggtgcttgtaaataatttattacagtttactctatcgcatttctgtaacatgaaatgcatgcccttcttcaggggaagactgtggtcaagttaaaaaaaaaaacaatattaaacaacatgaaactgcagtctgtttttgaaaatgagaatgtcctaagtgattcagaagagaggagggaagttgtgcactctgaaaatgcatgaaaaacaaaggcaaaaactagtgggaaatgtgtagaactgttaactgagacggcttcgagtcttccttctggaatctgttaaatttcacaaagtcatgagggtaaatggagaaaatatttctgggattacaatgaatgtaagcccaaattgtggaattgccagtaacctggatggggaaaagcatttcccatagcactccatgtaatatgagtgctctgtgagatgttcatcagtgttttatagaaatggtgttgctgggaaaccaagtttgcacctggaaacttacaatgcactttagcgcagtaagggcttggcatccggtagtgaaaaactgtctaacccagcattgcccaaactattttgacaccaggacctttttctcctttgggatacttatgaacctctcactaatgtcctgtggagaacattttgggaaacactatgttagatagttctttaaggagacaaaacggtaatgaacagatagcactggggcagaatatgcatgcattttgtaacgtccagtgtggcgttgaatagatgtgtatttcctcccctgcagaaaataagcacagaaaattataatgtaggtgatcggagctctttcctttgatagagagaacagccccaatgatcctggctttttcactgaacgtatcagaatacatggatgaattggggtaaataaggttttaattcagatctagaagaaagtattgtacgtttgaatgcagatttttatccacagatagttgtagtgtttagacatgacaggacctatcgttgaggtttctaagacttactatgggctgtaaacctgttttttaaaactattttagaaacctgagacttgccgtctggcattttagtttaatacaaactaatgattgcatttgaaagagattcttgaccttatttctaaacgtctagagctctgaaatgtcttgatggaaggtattaaactatttgcctgttgtacaaagaaatgttaagactcgtgaaaagaattactataaggtactgtgaaataactgcgattttgtgagcaaaacatacttggaaatgctgattgatttttatgcttgttagtgtattgcaagaaacacagaaaatgtagttttgttttaataaaccaaaaattgaacataaaaaaaaaaaaaaaaaaaaa

SEQ ID NO: 7698 - DNA, 453 bp, Homo sapiens
tttgggtaacacttagcacatattaaggacaaaaaagtcatagacctcgtagaattatagtttttagcatagcaatgattttgtagctcagaggaggtggctcttcattccattgcctgctatgagttttgtctcacattgctgggcacctctagcagatatatggtatgtgcagtgcttaaaacattgcccagaaaaacatataaaattgaggatataaataatttcaccttccccgtgcccccactttcctcttgcctcttgctgataagaaaaagattaactggattaattggcatgtgtcatccaagaatctcagtaagtctagaaacatgaagtctccaggctcagttatgagtggagctggttccatcttcatttcctgaggcccaggaaggtagggggcatggtcaaggtcacagccctaattagaaactgccacctagactcata

SEQ ID NO: 7699 - DNA, 6314 bp, Homo sapiens
  misc_feature (58)..(79): n is a, c, g, or t
  misc_feature (3707)..(3741): n is a, c, g, or t
gggcggggagcggggaccgggcatggcgctgcggagaggcggctgcggagcgctcggnnnnnnnnnnnnnnnnnnnnnngccgcgtgcctgataccgcggagcgcgcaggtgaggcggctggcgcgctgccccgccacttgcagctgtaccaaggagtctatcatctgcgtgggctcttcctgggtgcccaggatcgtgccgggcgacatcagctccctgagcctggtaaatgggacgttttcagaaatcaaggaccgaatgttttcccatctgccttctctgcagctgctattgctgaattctaactcattcacgatcatccgggatgatgcttttgctggactttttcatcttgaatacctgttcattgaagggaacaaaatagaaaccatttcaagaaatgcctttcgtggcctccgtgacctgactcacctttctttggccaataaccacataaaagcactaccaagggatgtcttcagtgatttagactctctgattgaactagatttgaggggtaataaatttgaatgtgactgcaaagccaagtggctatacctgtggttgaagatgacaaattccaccgtttctgatgtgctgtgtattggtccaccagagtatcaggaaaagaagctaaatgacgtgaccagctttgactatgaatgcacaactacagattttgttgttcatcagactttaccctaccagtcggtttcagtggatacgttcaactccaagaacgatgtgtacgtggccatcgcgcagcccagcatggagaactgcatggtgctggagtgggaccacattgaaatgaatttccggagctatgacaacattacaggtcagtccatcgtgggctgtaaggccattctcatcgatgatcaggtctttgtggtggtagcccagctcttcggtggctctcacatttacaaatacgacgagagttggaccaaatttgtcaaattccaagacatagaggtctctcgcatttccaagcccaatgacatcgagctgtttcagatcgacgacgagacgttctttgtcatcgcagacagctcaaaggctggtctgtccacagtttataaatggaacagcaaaggattctattcttaccagtcactgcacgagtggttcagggacacggatgcggagtttgttgatatcgatggaaaatcgcatctcatcctgtccagccgctcccaggtccccatcatcctccagtggaataaaagctctaagaagtttgtcccccatggtgacatccccaacatggaggacgtactggctgtgaagagcttccgaatgcaaaataccctctacctttcccttacccgcttcatcggggactcccgggtcatgaggtggaacagtaagcagtttgtggagatccaagctcttccatcccggggggccatgaccctgcagcccttttcttttaaagataatcactacctggccctggggagtgactatacattctctcagatataccagtgggataaagagaagcagctattcaaaaagtttaaggagatttatgtgcaggcgcctcgttcaatcacagctgtctccaccgacaggagagatttcttttttgcatccagtttcaaagggaaaacaaagatttttgaacatataattgttgacttaagtttgtgaaggtgtggtgggtgaaactaagagaaatgtagcattagctctcacaaaagaggaccaagaaaaatcaacaaacaaatcaaagccaggctcagagctctgaaattaaaaagcactgaaatagttagatgttttcaaacttttagaactcacattttaatcagggattgcatttattggctaactgcatgacatgcccattctaccatttaaaaaaaaatcttaaagcctgtaatttctgagaaaagagtacagcatttactcttatcatctagaaatgtaatatgcttccccccctctttttgatgaggaagaagaaaattggataagatgggacagcacttataatgaaataaaaaaaactttgagcccctctcattccactttagcaatctttttggtaagaactcttaaagccaaaagtctgctgaaaagatttgctgattattagtttaaaaatcttgtaacactcagcagtgctattttgagtcatcccagtttcctgaaagtaatgcccagtcttcctgaatcctccttaatagcagaaccttggtgattttgttggctcatatgaatgcttgtcatggatatgttaacaatttagtgtttgacattgcttcctctgccacaaagacaatactctggtgacacatgtctagacccagcacaggctgtaggcccaggagcgactcaaaggagtttttccctctttcttacggttcaaaggtgaccctggtggtggccagagcagtaatgcttgtttgatgctcttcatggctcatctgcttctcggaacccacccgttgagtttgtgggtaaccagcaggcaggccaaagactggtgcttttcatttcatcctttagagggatgaaacagttatttccgtctgatgagcattcggtagaatttttgaagtgagattttatgaagtcaaaggggactttacacagatctcgacctgctttgaaacctagaggtggccctttgatttgtgcgtgtccttgccctctggacaacttaatatttcaagtaatcgaataccaacttccctgccagcccacctgccttctgccccgcttgtgtaacagtcctgttttgttgagttgctgctattgcactgccagtgcagcccacaccaaatcacaacccaagatactcagataggaagactccttcctctcccagtactttaccaaaggaacccccccgcccaggacccacatggggccacgtgttggcagtggaatcagcctgtgcaggctggggatctcaggctgatcagtaggggccagctttggagccagccaagctgaatcccacactccaggtctgtgctcaagagaccagatggtgtatttccaaatgggcctctctggtatgggcaataggcaagctcctggggtctggttatgtggaagattcttagtggatgttccgcctggttagctggttctcttcagagaatataaagtgaatgcctttaggggtagctctgaaagagaaacccaacaacttcattcctagccatgaaagtagcacgatcatattgtactgtattgttattgtaaaatgattatttgccatgtcatgagtaggtagatgttttgccacaaatatgaatgtgtttgttgtttcctgactttaagcaatgaagattgagacaataaatagcactcagagaatgaagcattgatgttaaaaaaaaaaaattgggtaaattctgggactgtaggctgaggcttctagcctcagaaaccacggattttaatgaacgaactcacccacgcatagtagtgttgttacttgaaacttctgcaaaataccaagcaaacaggagaaaagtggtttgttttcatttttaagtgcaaattacttttcttctgcactttttttttccctcttggtttctttgaacaggctacaaatgcccaggtccccccattggaggctgaaaggggaagagctttgccattcctccagtcctaaagatggcaagctattctttctgttgcatggaaccactcagataaacctgggcagaaaaatggnnnnnnnnnnnnnnnnnnnnnnnnnnnnnnnnnnnccagcaactatgccagatcaaagtgatgttcccaattccagccacctgtagagatggcaaggtggcatcttttcacagtgttgctactgcagagaggtatcacattcccagctgcccctctgagggtaaatgagcgactgaccccctgcactcactattctgctcacattgccagattctgggaaaccaggaaacacaggatgctgggcttaggatggggagagctgttgagtccagatggggaattaggaggtgaaagaacgatctaaacaggtgatgggtggggtgtgagaagggggtgacccactcaactgcaatcaggttttccttttttataatgttattttatacaagactaaagcctgtagtctacagagcgcctgtgctgtggaaggagatatttgttctggccaacttactaaaggagcatagatgttcttggcacggggtggtgatatctttgcttcattaatcttactgctccatcccaagaatccctgaagttttaaacaacttctgcaagaagcattcttccagtaataatgtaaaacaaaaaaccaaccaagcaacagcaaaaatgcaaagcagagaaatatgtggaccgtccccagtggagatcagcttgaaggagggggtggatctttcttctactttccctcccatcacccactgggtggtcgtctgctcagcttatttcttctttatgaactttgtggcgaggctcctggactgatccctctgtgcggccatgtggctttaaggcctttccttaaagggggcttgtccccatactccatggggtcgggaatgggtctattatcaagactctaaaaataaatcttagacatgaagagcactgtgttattggacagtggctgataaggccaccttacatttagcaaagctttatatttttccaatgcacattagtattcacctcatttgttcataaatagctctgaagtttattgcagggcaggtattattctaatttcagagagaaggaaatagacatgaaaactatatgaattgcctgccatggttatccaatagggactggcaaagcaataactttccctctgatcagcagacattgtattttctttctaagacaccctgctatactctcccagagaaagactttcatttctaccatgattttgaatttggcagcaccttgagataaagtaaaaagtgcaataaaatatgcatagccagaagaaaaatcatactgaatagacaccattcaatcaactggtccatttaacaattaacaaacatgcaattgcatgccccactctttttacattcaaggccccactcttgaaagtggtccagaaattttggatagttttctgttgtactaaggaggatatctagctggtctggttgtttctccccctgcatagctatggggaggatgttgaggttgagacacatctggttcttgtcacattgtccaccagataaacaagaagagatctgtgaaggaaaaattcaaaacctgaatgcacgagtggtgatgaattgctctcggccgtcatcagccttcaggaagcacactggaaatggcagagttgcattttttcttccccatggagtgagagtctgtgtatttttaggaaagaaatcagcatgggatgccagaggtttggcggtcaggagtgctcatgatggaaatttctctggcctggggtataatgaaggtgagatgaagatctgcaggaggggagtctatttgcatgccacctaaagaaaacctcttaagctggcttcctgattcttctgcagaggtatcagcctctccttcgcagctgcggaaggaagttctttaattaggcagtggccaaagattctgttcaacagcttcctggagtggaatacaataatctagttgtatgcaatgatgcaattagaaagtggtccggatttgggtggcaatggaaggggaatggcaaagtggggcagatggctctggaggaaacttgggaaagtaaaaacaaactgaaagaaaaggaaaaaaggatgatgatttcttttgcctcagccaggcaagcagagggtagaatgaccaggaagattaacaacatctcaattattaatgaagagagccaactgtaatgctcattcaaataagaagcatattgtaaagctactgagattgaaaccaagttattattatccttactgtattccattgcttgtatcaaaatctactttttttctagtaggaaactatgcattccctatcagtccctttgattatcaggaatgtataagaattgtgataaaataggccaatatgctatttggtaccatttgtatgtattttaagtgcataacctaggtaaaataagaatagtttctatgtgtaaagaagcaagttttacagtatgcagactacagtggatgtattttaggctgtatacatatttagctctttttggtaaatagggtatacaaactatatgcctcttaattcaatatattcggtaagcctatgaataaaaagtggttcatgcctaaaaaaaaaaaaaaaaaaaaaaaaaaaaaaaaaaaaaaaaaaaaaaaag

SEQ ID NO: 7700 - DNA, 2196 bp, Homo sapiens
  misc_feature (2010)..(2010): n is a, c, g, or t
  misc_feature (2016)..(2016): n is a, c, g, or t
aaaaaaaaaaaaaaaaactcagttgcctctggccagtgcagggctcagccagggatggcttctagctgacagtgggaggaattaattcatctgaccggaatattcttttctcttctgggctgttggtttttcaagtgcaacaaagattccatacagctccaaggaaggagccaagaaaaacattctgtgccaaagtgagatcctggaagtgaaaccccggaataaagctgaaaagcgggctccagttgggtgccaggaaatgcaggactggaatgtgacttgacttccggcagcgcgcaggtgctcccgggtcacctgctttgaggtccagcctcctgccctgcctcaggtgaccacatgaccactgtggactttgccctgaaaccttctgggaggagaagaggcctgaccttggcgctggggtccagtgggcattgctctggtccgaggctgctgctcttgacctctgctctgcggctgttttccattggagtagaggctcctcctgtcctgtcctgcctgtggagggaagcaaaccttcccctggaccagagagaggagaaagcggagacaggtagcaacgctgtggactggtgatgacaggctcttcagctccctgcaagtgaccgggcctggggaacagggcatggcacaggcacacaggaccccccagcccagggctgcccccagccagccccgtgtgttcaagctggttctcctgggaagtggctccgtgggtaagtccagcttggctcttcggtacgtgaagaacgacttcaagagtatcctgcctacggtgggctgtgcgttcttcacaaaggtggtggatgtgggtgccacctctctgaagcttgagatctgggacacagctggccaggagaagtaccacagcgtctgccacctctacttcaggggtgccaacgctgcgcttctggtgtacgacatcaccaggaaggattccttcctcaaggctcagcagtggctgaaggacctggaggaggagctgcacccaggagaagtcctggtgatgctggtgggcaacaagacggacctcagccaggagcgggaggtgaccttccaggaagggaaggagtttgccgacagccagaagttgctgttcatggaaacttcggccaaactgaaccaccaggtgtcggaggtgttcaatacagtggcccaagagctactgcagagaagcgacgaggagggccaggctctacggggggatgcagctgtggctctgaacaaggggcccgcgaggcaggccaaatgctgcgcccactaggtgcagccactcctgggggctgtggggaagacaccccctgcctgggccatggccagctctaggtggattctgattcactgtcaatgctgggttgctcccgagccctagatgttcctggaagttggccccctttatgaaaaccacttcccacagccagtgggaactgccagaggaagatctggcgtcacatggctcccaggaaagtgctgtgccctatccccactgataccatctgattccccgatgcctgtgcctgttccacctggacggtggccccctcagcctggcagcctctggacagagaggaaggaaggattggaaaagtccccgcagcacagcgacggtgggaagatgccttacgtctgatcttgatgggggcactggcctggagcctgggcccacctgcttctggggggttggggagcaggccagatggaggtggtggtgccaggaagaaatggagcgatgactgactgtggggtgggcccaggatttccacatcttggtgaagttgcccctgggaagggcagctgggggcagtggcgccagttcccttccatggtctcccggctggcaatgtggtgaagctgagtttctgtccaatgagcaggaagattctgagacatttcgcctgagatataagttgtactgcgtatgcagtttttcctccaaaaattaaattgcttttgacaatctgaaaaaaaaaaaaaaaaaaaaaaaaaaanaaaaanaccaagggggcggccgcctcttaaagaaattcccctcaaagggggcccccacttttaccctaacccccacttttcttttgtaacaaaagggggcccctaaaaaggggagcctcgctattataaaccttgaggccacttggccccgcccctttttccaaacctccctgggaattggtcaaa

SEQ ID NO: 7701 - DNA, 3279 bp, Homo sapiens
  misc_feature (385)..(410): n is a, c, g, or t
  misc_feature (794)..(820): n is a, c, g, or t
caaggaggctgctgattgtggcccacagcctcatctgaacgccaggagaccaggataccgaggcaccggatcccctctctgtgccctggggagccccagtgctgcccagtcaccccagggctgaggtctgcgtccctagtggtgcaaggcctggtaggaccacggggcaggtaatgtgagcgccatctgagctcacggtgtcctgagtcgcggcttcgtgactttggcaggggcctccggaccagtgaccccagtcaaacccagagggtcttgggcggcagcgacgaaggaggtattcaggctccaggccaggtggggccggacgcccccagccatccaccatggtggtggcacaccccaccgccactgccaccaccacgcccannnnnnnnnnnnnnnnnnnnnnnnnngatgaccacggccaccatggacctgcgggactggctgttcctctgctacgggctcatcgccttcctgacggaggtcatcgacagcaccacctgcccctcggtgtgccgctgcgacaacggcttcatctactgcaacgaccggggactcacatccatccccgcagatatccctgatgacgccaccaccctctatctgcagaacaaccagatcaacaacgctggcatcccccaggacctcaagaccaaggtcaacgtgcaggtcatctacctatacgagaatgacctggatgagttccccatcaacctgccccgctccctccgggagctgcacctgcaggacaacaatgtgcgcaccattgccagggactcgctggcccgcatccnnnnnnnnnnnnnnnnnnnnnnnnnnnacaactccgtgtccaccgtcagcattgaggaggacgccttcgccgacagcaaacagctcaagctgctcttcctgagccggaaccacctgagcagcatcccctcggggctgccgcacacgctggaggagctgcggctggatgacaaccgcatctccaccatcccgctgcatgccttcaagggcctcaacagcctgcggcgcctggtgctggacggtaacctgctggccaaccagcgcatcgccgacgacaccttcagccgcctacagaacctcacagagctctcgctggtgcgcaattcgctggccgcgccacccctcaacctgcccagcgcccacctgcagaaactctacctgcaggacaatgccatcagccacatcccctacaacacgctggccaagatgcgtgagctggagcggctggacctgtccaacaacaacctgaccacgctgccccgcggcctgttcgacgacctggggaacctggcccagctgctgctcaggaacaacccttggttttgtggctgcaacctcatgtggctgcgggactgggtgaaggcacgggcggccgtggtcaacgtgcggggcctcatgtgccagggccctgagaaggtccggggcatggccatcaaggacattaccagcgagatggacgagtgttttgagacggggccgcagggcggcgtggccaatgcggctgccaagaccacggccagcaaccacgcctctgccaccacgccccagggttccctgtttaccctcaaggccaaaaggccagggctgcgcctccccgactccaacattgactaccccatggccacgggtgatggcgccaagaccctggccatccacgtgaaggccctgacggcagactccatccgcatcacgtggaaggccacgctccccgcctcctctttccggctcagttggctgcgcctgggccacagcccagccgtgggctccatcacggagaccttggtgcagggggacaagacagagtacctgctgacagccctggagcccaagtccacctacatcatctgcatggtcaccatggagaccagcaatgcctacgtagctgatgagacacccgtgtgtgccaaggcagagacagccgacagctatggccctaccaccacactcaaccaggagcagaacgctggccccatggcgagcctgcccctggcgggcatcatcggcggggcagtggctctggtcttcctcttcctggtcctgggggccatctgctggtacgtgcaccaggctggcgagctgctgacccgggagagggcctacaaccggggcagcaggaaaaaggatgactatatggagtcagggaccaagaaggataactccatcctggaaatccgcggccctgggctgcagatgctgcccatcaacccgtaccgcgccaaagaggagtacgtggtccacactatcttcccctccaacggcagcagcctctgcaaggccacacacaccattggctatggcaccacgcggggctaccgggacggcggcatccccgacatagactactcctacacatgatgcccgcccacccgggctgccccgcctcagccccagctgccctggcgtggccatgtggctttgcccagcctgctgcaatccaagagagcaaggaagagaaattccatgggtgactttcctctgcagaaagcaaagtttggggagggctgacgattttgtagaacacaacagtgacaattttttttaaaagaatagaaggcaggagggggaattcgacattgttgaagacataatttataccaagttatgccagttggggagggaaggactaaaaataatattgcaggcagggctgggttgggtttttttttttcccccctgaactggaaggatactacctgtacaacatctgtggacacctcatgctctgttcaaggccatcacaaaggaaccgcccagggagaagcagccggctctcaaagctcccacgcagctctcccgccactggccactcgctggcgacccgatggaaggttttcaggctcctcacaaaggagagagggaagaaaagatcttttgccctggagatatggtcctgaaatctctcccctggcttattccataccatttcccttgcagatttgcagaaacatggcatctttcactgcattctttgaacaatcatgtagtcgattaaaaaaaaaaaacaaaaaaaaaaaaaaaaaaaatgaagccctcttcagttccatgcaccacgctccgtagaagccccggcggaagccgtagctttccctgccacctggaggtgcatctgtctgcctgtctatccctgtcgcggtgtctctaagtacagatgggtagatagagccacatgcacggtccttaccgttcttcttgggtcagttcttaccatttcctgaacaatagaattgtgaaagtgttgctttctcctcgaaaaaaaaaaaaaaaaaa

SEQ ID NO: 7702 - DNA, 2748 bp, Homo sapiens
  misc_feature (1573)..(1591): n is a, c, g, or t
ctgtggccagacgtctcccacagcagggacagcaccaggcaagaagggggcctggtctccaggcaggaggagtgcagcccacctcccctctggctgacccctgggcagtgagcctttccatcacccctacacacatcaggctcagagatttttttttttttcttcttggtacatgattttataggaagcacatttgtgttcaagtgaaggcagaggcgtccaccccaagtcaccagagcgcaggtgcagagaggaaaagctgtcagctagtgccagcctccaagggccagcgctacccttcaacagctggaggcaccactgtgcgaggctttccacaccggcctccctcaggaacaagacatcctcaccaggcaggggtgaggtatgggctccaggactggcttcagcaggcaccaggctggggcaccagctggggcctgggtacgcccagaaggtcacacagacggttgcgctgctctctcaccactgcaagctctgcgtcccacgcagtgtcactgcatagagcagccagggccgagactgctgcatccttcatctgctggcgggagtgacttgagatgagatggagatgtctcaaagtgtcatttatcagccattgccaaccatcaattacggtgtcacctctaaagggcattttggaaagtgacaacttttctattaaaacacacactgcttgtctcatgagctgtcctcccagacccctgtataactgacgatcatagagctgctggtgaatctgcttcaggccctgcactgcctgctcgtccagatggtccgtgacgggcctgttctcttgggctgcaagtttgtacaaggcgtaagcaacttctgcgcaggcgagaatcgacccatgcctcgtgtgaagatctggactcagtgtcatggacagcagcctcgggaagacttgcgtggcgctgaactcgggtgcctgctgggccaggttgtgcagcgccctcgcagccaactctcggatgaccccatcccagtggctgatcttcatggtaaccaggtggtctatcattggctgcgtgtactcaggaaagccggcaataaacacacttataaccaggaaacagttggatctgttaccgacggcaaaatagtcagctgtggtcaaaatatcaataccatgagggaaagtgccctgtctccccacattctcctggaaggcggcagaggctgctcttctgcagtttatgtctcggtcaaacaccgcagcaatcaccagtgcactcgagattgcagtcacaaagggcttcagctcctgaggctcataggcacgcgcgaaggcccagcacacgtagcaggcggcgtccctgacgttggtgcccacgctgcaggcaccccgcttctcgtcgtaggtcagcgccttcaggatcacggcgacaacatccacgagtcgagacggcagcaacaggcctctcctgcccagctctgccagcgccagacatcccccatgccacgccttgtcagtctcctggaaactgaagcagtccagcacagacccgaccacatcatccgccagggctctgggaagcctgccagccatccnnnnnnnnnnnnnnnnnnnctgcagaccaccgcacgaccgtgtccttgtccttcagcccgaccagcagctgctctatcacacgctccaccccctctgggacgtcgtcatcttcgtcgtcatcttcggtcaggatgagtggcttctgctcactctgaccctgagtgaggagctgcagatttgcagccaaagatcggcagccacgctggtacctccatgctgccaccttcggcttcaggaatgtcagccccagtcgctgcacaagcttcacccccagcttccgcagcagggtctggttgctctcagggagtctgcagccatcgaggcacctgaggacagtggcagcatagggcaaacagtcttcacgttttccatgtttaaatatttgtgccagggcctgcagcgtcccatccatggtgatgaccccctgcatggtctggaaggaggaacgggccagattgcacaggctccagtccaggaactcagccatcttgctttgcttgacatcaggacgtgtgataaatctggacacaaggacagcagctgcatctcgggccttgtcactgacaatcaagtaggactctgctatttggagaatacggtccattatggacattcgtgcttgcccaggctgggtgaggaggttcccgtcaaggcgagaaaaatcaaaagggatcaggcaggtcacggagagccagagcaaaagcatgtagcgggtttcccaagcttcatggtccttgggattctgaattgtgaccaaatctaaaacaggctctacatcggcaacttcatgaggaaataaacgaagaaatgttttatagcctcgaaccttggtgatgatgtaaagaaatttaaaagccagatgtacaagggaagctggagatgtctgatcttgcactatgtccaacaacaagttcatcatccattcgcggaaccgctccagggccacctcgcgctccgcgccgccgccgtgcacctcccgcaggcggcccagcagcgcccgggtctccgcgctctcgccgaacgcttccagcgccgcgccaaaggccagtgtctcgtcctccgcctcctcctcggggccgcccgcggccggttcgtcgctcagggccatctcggcagcctggggaccgcgcccccgcctcacgtgttcgcagatcccactccgctagagcgcgaaa

SEQ ID NO: 7703 - DNA, 1715 bp, Homo sapiens
agctagtagctgtgtatggcgagggccgactgctctggcgtgttctggcaaggcccactttctactcgtgctccttccgcttcttttccgtactgtgaaaaagactctccaccccagctcccacctgcctggctgggtggaggaactgtgcctccatccccagaagaaacagcccctctgctgctggggtgggactgtctgtgtgccctgtgggggtccgtgtgacaggccactggtccagaaccgccccaactgaacagaacctggtaccgctcacccacagaggtctgtgccagatgcgcttctgcaggtggagccaagctctccctgaggccagaggcggggcctgggccgggagcccaggggaaggccaggctggaccccggctccacacccacattcagcctgcaggcctctctgcagtcctctcaccctccctcagctccccttcctctgcagtcaccctcagctccccttccttgcccgctctccccccgccgcccaccagttaaacggatgaccaaagacttcttatgccggaagcaaaaaccaaaatttgtggctttttcctttgtcgcctccccagcactcgtgccctcccagtctcccagcgcccgggcctccaggcttggaagccctccctccacttaagttacttggttttaaaccaaagtttacagtgtctgttggtggacaagacctatctctctccaacccatcatccatccaccctgaggaccctggggctcagtggaggcagggccctgccccctcccttccgctcctgcccagcctgggggaaggagaaaggaggggagaaagcgggctctcaccccctcaggagtgggcacgggagcccttctccctgaccctgggctgcttcctgggggctctccagacccctctctaggaccaagtcacccgtcgtgctgggagtgtggattctagcaaaagagctggaaaaaagtcagactctccacagaccccctatgggggacccccaactcaaggccaaggactgggcgtatcggatgctcataacacccctggcctggcccctttactgagaagactccttggatatttcccaagaaccccccacatacacccctcacaagccacccctcctgagaggcagggggccctccgccccctccccatgtattccccacctgtgttccgtttgaccagcacagaaatattaaacgtcctctattcaccgggaaaaaaaaaaaaagaaaaaaaaaaaaaaccgcgcgggggccatcaagggcgggggggggaaaaaggggaagggaaggggcccggggcaaaaaggggatccggggcccaagttttcgtggccacacagggggcaaataggggggaccaccaaaaatggggagccgaaataaatggaaaaggccaggttaccggggattagacggcggaacacgaggcacacaaacgaaaacacaagcagcacgagagagcgcacgagacgacagggggatctaaccaacacaggacccaagcagaacggggagcacggaagaagggataacaccaagcgaaagaaaccacaaaacaaggcaaaaaaaagaaaacaagaaaaaaaaaaaaaaaaaaaagaaaaaaaaagagaaaaaaaaaaacaaaaagcaagaaagaaaggaaaagggagaaagggagaagagaaaaaaaagaggaagagaaaaaaaggaagaagaaaagac

SEQ ID NO: 7704 - DNA, 2291 bp, Homo sapiens
gtttaaagcaagtcatggatggttccagcgcttcaaaaggcgtcataattttcacaatgtaaagatcactggtgaggcagcacgtgctggtaatgaaggtgccatagcttttaaggaacagctgcataggataattatggctaaagatctttgcaataaggagctgattgcactggaggaagaaagaggtaaaggcgttgaggcagtggaagaagttacacccacggcacctagaaagttcacagcaaagaaactggccgaggcatttgctgctatcagcagtggcctacacgttagaagaaatggacgtcaattacgagagattcgccacagttgacaggcagatacaggatgctcttgcttgctacagagaaatatgtagtgaaaagaagaaacaagctgtacggtcaaaacttggtatcttcctgaagaacaacactatgcttgctaaaccatcaactagtgttgatgtcccaatgccttctaccacctattctcgatgttcatcagaagagagagaaattgaggaccctgttgcatccccatcatccagcaattaattctatttcagtgcttcaaacatttttcaggaccactgtgctttcagctgtgtaaattaatggtgagtacccatacaaccattgttttccacttacagtattcaataaattacaggagatattcaacactattataaaagagcctcgtgttagatgatttttgtccaactgtaggctaatgtaagtgttctgagcacatttaaggtaggctaggctaagtcatgatattctgtaggtgtattaaatgcatttttggcttacagtattttcaattaattgggttaattgggatataaccccatggaaaattgaggagcacctgtacatagtaaaactatgcaaaaaatattttgtgttcttaagtaaaatgatgttgagttctcatctcagttattaagtttttcagctgcactcacgtccaatgggacaactcttcattttgtaaggtttttagcatccttgctcaggcttagtaaatttcagtagtgcacctcactccaggcccattaatgtgacagtgaggttcttctgagggtaactgatttgataccatctccactgagaaccactgcattgtgaaaacaccgattagcactgtattccaggaaagggttatttttggtttctttaaatcttaggcatcttggtaaaacggaacatcttcacaagactaagggaagactgaggaatagagtttttgaactttatgcaacttcgtttacatcaagattcaaaatgacctaaactgtttcatgtggatgcttgaatcttttctagtacactggtggtgggcaagagggtgttggaaacagggtgcaggcataagatcaaaggtgtgttttgccttttttctggatgaccattaagtgtatagtcaaaatgtttctctgataagcctatacccctgtaagaagggaaggcgcgagtgaggaaaggaggtactgtagatgccctccaaatccttggttatggaatatttggctcatcccagtacactcggcttggctgttggagttgcttgtggcatgtgcctgggctggagccttcgagtatgctttgggatgctccccaaaagcaagacgagcaagacacacacagatactgaaagtgaagcaagcatcttgggagacagcggggagtacaagatgattcttgtggttcgaaatgacttaaagatgggaaaagggaaagtggctgcccagtgctctcatgctgctgtttcagcctacaagcagattcaaagaagaaatcctgaaatgctcaaacaatgggaatactgtggccagcccaaggtggtggtcaaagctcctgatgaagaaaccctgattgcattattggcccatgcaaaaatgctgggactgactgtaagtttaattcaagatgctggacgtactcagattgcaccaggctctcaaactgtcctagggattgggccaggaccagcagacctaattgacaaagtcactggtcacctaaaactttactaggtggactttgatatgacaacaacccctccatcacaagtgtttgaagcctgtcagattctaacaacaaaagctgaatttcttcacccaacttaaatgttcttgagatgaaaataaaacctattcccatgttcaaaaaaaaaaaaaaaaaaaaaaaaaaaaaaaaaaaaaaaaaaaaaaaaaaaaaaaaaaaaaaaaaaaaaaaaaaaaaaaaaaaaaaaaaaaaaaaaaaaaaaaaaaaaaaaaa

SEQ ID NO: 7705 - DNA, 1922 bp, Homo sapiens
  misc_feature (147)..(182): n is a, c, g, or t
agttaatcacgtgtattactctcatgaatacctgtgaaaaataaaaacagtgggatttggatgaaattcaagatagaccagaaacaggaggaaagtacaaatgtttacctaaagccagagaatttatttctagatgataattacatnnnnnnnnnnnnnnnnnnnnnnnnnnnnnnnnnnnngccgatagcaatctctggtgaataatggttttcgaggagaggagacacttaaattgttagtgacatgagtggaggagaatctgatatttactaatgaggcagtttgcaaagactgtccctgaagtgtagtgtagtctttcagggggattcatttagtaagctagattgatttaacctggtactgtactagcatagggtcaaatacgtgtcatcagagacctgggtatgaccaggcttacaaaactcaggaacaaactcagattcctactgacctcaaccaactaaactaggccaaatttctccgtgtacaaaatggaccacgttatttacaatccacgtggtggagaagatggtagacatgtggagagagtttggccaggtgctccattctaggtctttttccagtttctcaaaggcagaacattggctcctaattatttgccatggatatttgcttcctgttctggagctatgttgtaagacagctgtgtgatgtccatcattcttgactccagaatgaagacagggcttgctgttttctgtcctgttggtatcatctgttgccttggcgatcactcagtgatgagtcgtcagtattttgacatgtcccagtgcttgctgtacaagaggggactcagatcaacaggaagactctgaagacaggaacctgcatggtatcttacatctttgatacttgggtgctgatatgaagcagagttgttgatttactttatctaggcccttctttcatctcacctggatcaagcaactgagaagtgtatcaggagacactggatacatatctctatgaaatagagagggccatcgcagggcctggtacttaactacattaacgttctaaaacccagtttggtttacgttgtctttcacagtagtatatttagctcttctctggaaagttgtgggttaatataattcttaaacatgaaaatgtaattaaacacaccacgagagaacaatattccaggagacttaatagtgattactttcttcaatcaggaaatcgtttcagtgcctccttgtaggaatgctttgttttgtgatgggttttcttaaagaagagcacacctccgtccaatctcctgagacagccacgtctccgctgacatcccactgtgatgctttcagatagtcagtgaatgtttctgataaccttcatccagtatctgaaacacaatgtgagagattatattgttttagataataacatcccatttagttgactaaaatcttccaaactctgaaagctgcacactgctactccagagagtgcaggtcttagctcttctcctttctgacttcaagatgaatctttgggacgatgtttctggtgcttggtccacagtgattcacttttgaaggagaggccacatgacatgaactgcctggtgttacaacctagctaacatatttgatgctactcctgttgtctgtactgcttattcaagtagtattctaagttatgttactaaaaaacatggtgggtaaagcacaatcctacccatcattgtcctccaaaataattgtatgacatacacggcccagcccattgccctccctgcatctctgtgctgctttgccatttccccttctacccagcctcctcaaggggtaccttggtggatatttcagtacttaaaaccagactgtaatcataacctccctctgtgtggcatcaataaatagccaaactcaaaaaaaaaaaaaaaaaaaaagaaa

SEQ ID NO: 7706 - DNA, 8781 bp, Homo sapiens
  misc_feature (1741)..(1756): n is a, c, g, or t
atgatgatgaacgtccccggcggaggagcggccgcggtgatgatgacgggctacaataatggtcgctgtccccggaattctctctacagtgactgcattattgaggagaagacggtggtcctgcagaaaaaagacaatgagggctttggattcgtgcttcgaggggccaaagctgacacacccattgaagaattcacaccaacaccggctttcccagccctacagtacctggagtccgtggatgaaggtggggtggcgtggcaagccggactaaggaccggggacttcttgattgaggttaacaatgagaatgttgtcaaagtcggccacaggcaggtggtgaacatgatccggcagggagggaatcacctggtccttaaggtggtcacggtgaccaggaatctggaccccgacgacaccgccaggaagaaagctcccccgcctccaaagcgggcaccgaccacagccctcaccctgcgctccaagtccatgacctcggagctggaggagctcgtggataaagataaacccgaggagatagtcccggcctccaagccctcccgcgctgctgagaacatggctgtggaaccgagggtggcgaccatcaagcagcggcccagcagccggtgcttcccggcgggctcagacatgaactctgtgtacgaacgccaaggaatcgccgtgatgacgcccactgttcctgggagcccaaaagccccgtttctgggcatccctcgaggtacgatgcgaaggcagaaatcaatagacagcagaatctttctatcaggaataacagaggaagagcggcagtttctggctcctccaatgctgaagttcaccagaagcctgtccatgccggacacctctgaggacatcccccctccaccgcagtctgtgcccccgtccccaccaccaccttccccaaccacttacaactgccccaagtccccaactccaagagtctacgggacgattaagcctgcgttcaatcagaattctgccgccaaggtgtcccccgccaccaggtccgacaccgtggccaccatgatgagggagaaggggatgtacttcaggagagagctggaccgctactccttggactctgaagacctctacagtcggaatgccggcccgcaagccaacttccgcaacaagagaggccagatgccagaaaacccatactcagaggtggggaagatcgccagcaaagccgtctacgtccccgccaagcccgccaggcggaaggggatgctggtgaagcagtccaacgtggaggacagccccgagaagacgtgctccatccctatcccgaccatcatcgtgaaggagccgtccaccagcagcagcggcaagagcagccagggcagcagcatggagatcgacccccaggccccggagccaccgagccagctgcggcctgacgaaagcctgaccgtcagcagcccctttgccgccgccatcgccggagccgtccgcgaccgtgagaagcggctggaagccaggaggaactccccggccttcctctccacagacctgggggatgaggatgtgggcctggggccacccgcccccaggacgcggccctccatgttccccgaggagggggattttgctgacgaggacagcgctgagcagctgtcatcccccatgccgagtgccacgcccagggagcccgaaaaccatttcgtgggtggcgccgaggccagtgctccgggtgaggctgggaggccgctgaattccnnnnnnnnnnnnnnnnggcccgagagcagcccagcagtgccctccgcgagcagcggcacagccggccccgggaattatgtccacccactcacagggcggctgcttgatcccagctccccgctggccctggcactctccgcaagggaccgagccatgaaggagtctcaacagggacccaaaggggaggcccccaaggccgacctcaacaaacctctttacattgataccaaaatgcggcccagcctggatgccggcttccctacggtcaccaggcagaacacccggggacccctgaggcggcaggagacggagaacaagtacgagaccgacctgggccgagaccggaaaggcgatgacaagaagaacatgctgatcgacatcatggacacgtcccagcagaagtcggctggcctgctgatggtgcacaccgtggacgccactaagctggacaacgccctgcaggaagaggacgagaaggcagaggtggagatgaagccagacagctcgccgtccgaggtgccagaaggtgtttccgaaaccgaaggtgctttacagatctccgctgcccccgagcccaccaccgtgcccggcagaaccatcgtcgcggtgggctccatggaagaggcggtgattttgccattccgcatccctcctccccctctggcatccgtggacttggatgaggattttatttttacagagccattgcctcctcccctggaatttgcaaatagttttgatatccccgatgaccgggcagcttctgtcccggctctctcagacttagtgaagcagaagaaaagcgacacccctcagtccccttcgttgaactccagccaaccaaccaactctgcagacagcaagaagccagccagtctttcaaactgtctgcctgcctcattcctgccaccccctgaaagctttgacgccgtcgccgactctgggatcgaggaggtggacagccggagtagcagcgaccaccacctcgagacgaccagcactatctccaccgtgtctagcatctccaccctgtcttccgaaggtggagagaatgtggacacctgcacagtctatgcagatgggcaagcatttatggttgacaaacccccagtacctcctaagccaaaaatgaagcccatcattcacaaaagcaatgcactttatcaagacgcgctcgtggaagaagatgtagatagctttgttatccccccgcccgctcccccgcccccgccgggcagtgcccagcctgggatggccaaggttctccagccaaggacctccaagttgtggggcgacgtcacagagatcaaaagcccgattctctcaggcccaaaggcaaacgttattagtgaattgaactctatcctacagcaaatgaaccgagagaaattggcaaagccgggggaaggactggattcaccaatgggagccaagtccgccagcctcgctccaagaagcccggagatcatgagcaccatctcaggtacacggagcacgacggtcaccttcactgttcgccccggcacctcccagcccatcaccctgcagagccggccccccgactatgaaagcaggacctcaggaacaagacgtgccccaagccctgtggtctcgccaacagagatgaacaaagagaccctgcccgcccccctgtctgctgccaccgcctctccttctcccgctctctcagatgtctttagccttccaagccagcccccttctggggatctatttggcttgaacccagcgggacgcagtaggtcgccatccccctcgatactgcaacagccaatctcaaataagccttttacaactaaacctgtccacctgtggactaaaccagatgtggccgattggctggaaagtctaaacttgggtgaacataaagaggccttcatggacaatgagatcgatggcagtcacttaccaaacctgcagaaggaggacctcatcgatcttggggtaactcgagtcgggcacagaatgaacatagaaagggctttgaaacagctgctggacagataaggacggctgctctccacctcgcagactgctcttgttataagtagagatgggctcgtgctgaaacatctgaatgccaagcgaagtctgtgagcatcaaccccactccatgggtttgtctcctggtacccaaagaaatactgagttgtgtccacaacatggctgggtcttcagacccctggctcaccatgtgggtgtcttgggcagtttctatcacacatgggacaaggggagggagtttttctaacatggaaaaagattctcagcctgccgcccagcatgcaggtggcctcgctttgccgggtccgagaggctccccgtcaattttgcacgggatcctagctcttgtaggcagacaccagtgcactctagatacctcctgagacctccgtcctctgctttccgggcagctctcaccaccccaggccccggcatgaggcctttcctcagtcctgtggcctctcagaggacacctgatgctcacctgcccctctttctcctgcacttggcttgcagtgagatgctcccagatgcatttgtccagtgccccatcatgggcctgaaaggcagagaaactttttcctacacagattcttttccccatctcctcctgtggtttgcatccatggctctttggccatgaggttcctggcagtgctgggagtttggatgggatcgtgcccagctttgcttagctttctttatttctgcaaatctgttagcataattccaaggtggccaagcagatgtcacatggagttagtcaaagcacaaagtcacgattccacaatggaggggagacctggccaagggagccagccagcgtgcaactgcccaagctccaggtctccaggacaagagcagttgtctgccatgagcacccatccaggatggagaataagggcttctctgcctctcagaattctttttaattgaagatgtcttgagctctgcaaagatcagagcaggtgagcatccactttgacatgaaggacaagaagacgcatggctcatggcgggcacatgcggctgccagtgagacagcgtctcctctgggagctgggcgggcacagcatcctcagttctgtgcccagccaagggtgagcatctctgctgagacagtccttttgctctcggaggccagggaagatggtacttagaggcttttcccctatcgctctgggtgtctaggaatcccaccagcttgtcttaacagtacaacagcttctttgaggacccagtgggtatggagtatagacagaacccagggttgagaacagaaggtgggcggcaggatcagagtgaaagcagaggcgtgaggagaggaaagcagggaggtctcctgggctgccaggtcagcctctctggcaaggctttcttgagccccgcccctttctttccccggagtccctccaccccataacaatacctcgaatttccaaaagaggtcaccagatgcacatgggccgcaaaacacacagtcaggcttccagcacattctcccccatttggaggatactcgaatgtcaggtttttggttttattattatttcagaactagctcagcccatctctaattataaaacatggttttgttttttttttttcctttttttcttgattaggtctggaacagctctagaatgaacacataaaatttagcaatttaaaatctttctttactgcaagtttaaatagttgtacagatagtttataagcacaatattttaagaaaaaaaagtggctggtctactaggcagcctttgtgccacttcagtgctagaaagttaaagaaaaaaaaacttttgtgatttaataatactatttctgtggaataattataaaagtatgacctttttaaatcaaccttatttggatgcatctgaaccagcagagctgtgttatattttctatctttgctagaacttcgtcattgaaggacaatttcttcaaagtggttacaattcataatgcagcagtttctccaaaaacaaaaacaaaacacacaccacacacacgcgcttttccagtcacacacccctgatgttggaaccaagtttttggaccttctgttccaaaaccttttgcaggtcaatctttgtatttgaaatgatccaatccaacttgaagtcaattgaatattaaggcgctttacttccgtgtgctttcagtttttccatcatgagatgaatgagcattactctagataaatttcaagacaggatactacaggtggcctgctgaggctgccccatattttagaaaatgtaaaaatggtggtttggccattaatttgtcttccatttgatgataccgcaaaattccgtgagtccattcctttggcatggcactttccctgggcctacagttggtattacctctgtgctcagtgccaggcaaaacactagctcaaaggagagtcaaggaaaccgctggcagacgataaccagtcgaaactcgtgacttcggtttgttgaactttggcagccagttggtgagggccagatgttattccctttcttaaagatactccaagccacatgccactaaccacaagcaagctggctgcaagactaaagagctgataacatagtttatttttacactgtcttattatagagaagtaatagacctatcagaacctgcactgaccaacaaataaacacatgttgccaagatgaatcggtctctatctctatctgcttattttggtactgaaagcaatagttcctcattcaaatcaccacccactgttctccccctttgggacatgttaggacgaggccctattccatgcccctctttaatggtggaacaaatgttaaactgctcatctaaagatcatgttgatattattccaggttttaagatcaacttttgttacatactgtaatttaaataaactgcatttacatgcctagtttctgtaatattgtgtatacaaaacccaaatctctcaaaatgtaaattatgtatacctgccaagataccttttccagggtgtctgcgcacattttaagttaattcacataatataaaaattactcaatgtgactgttgatttgctgaactttacatatcacaaagtgaattatttgtgatactttagttaataaaatggtaaatttttttctcagttattgaacaagcaagcattatccagttgatctggcaatgactttttgtgtgtgggccacaatattgattttcccattaacaatttttttttgttttttaaatactaatatgtttcacactatagtttgtgtaacaacacgtgttcgcattatctatgttgctgttacttttgtgcttttattctttttagactttataaaaaaaaaaaaaagctcctgtaatttgcactttctcccaatccttaaatctcttgtatggcaaccaaaattactgtaaaaaaataaatatactattgcactaaggttgtggttctgattgcaaacaaacagtgaacactgtctgaattaaacaaaaagctgcccgacttgcaatctaatgtagattatctcaggcattgtggccagctctgcctctctaaaactgaccagaaaaatctctctcatcgagtaaacaggctcctgtcactgagctaatctgccttggttccatttccttattctcaatttatcaatggatacgtgcatgttatttcagaattatgcaaaacgtcaaaatctgcttctgtgaccgctgctataggcgtggagctgaggctcggcttttccttttgttctgggtggaagcagcggtgccgcggagggccagccagatccggacccttcccttagggtccagtctccccacaccccagcagggtgtcttctagccataaggccaagggagtggcagaactgggccgcctctctggttgacaagcaaaccacatgctaaggcttggagcaagagagaatttgtgtctattggcaaagaactaagccaggaagacatgggccatccctccgctttagggaagcatattttaaacctaaacgttgaacttcttctttggcctcaccagtgaaaacttgttgtctttagttcctaaagtttcttctactttggcacattccccagttgagcagcagcctctatgcttccacgttcaggaaaaattccagtcctcatatcttttgtagttcaccctcaagctctcccgcttcaccatccaatagtttctcccaaaccttggcacccccctagactttgcttccaatggtttcttccagaccacttttcctagatgaatatattcgtttaccttactaggaaaattattggaagattttttcttttacttgaaattggaggcattttaataactggcgaactggaatgtgtttctgtatttgtagacaaccatgtacccatgcaagtaggtgaacattccacagtggctgggtgaccacagcagctgcatgcagacaggactgcccgtgctttgtggggaatcagagaatttccaaacttgtttctcagacttccgcagatctcatcactttgatttctaatccatgctgtattggtgattttgtttatcgttcctgtaacttgttctacattccacagtctttaccgttttatgttcaaaattacaacaatccctgtccattgattccactctggaactctttgttcatgccaattttgaaattttaatacgagccttcaaataaacacagaaaagaaaaaaaaaaaggaaaaaaaataaagtgtgtgccttgggtgttttgaacctgatctgcataaaaccatattgtattcaaatgctgtatctttcatgaaaggataaatatatcttcaatgtattaatgtagctgataaaatagttatagtgccttgttttctgaactgagaagcccatatcaatgcacaacgtaaagaaaggacggttcgagctatgaaatgttgaggacacctacacgtgattctggagcctttctcatcataagactgtggaaaatacacagtcgtttaagttaaaaataaaaagtaaattgagaa

SEQ ID NO: 7707 - DNA, 1065 bp, Homo sapiens
agaaagtcgacgggcgtggcgggggaggggacgctgagggcccatgtgctgaaaatccgaagtgccgcggaaagtggaggtgagggccgcccgccctagaggtgcccgtccgagaggcagagctgacaaggaaggtttcgagcgttttgctggcaaagggatttcttacaacctccaggcatgcgtctttctgccctgctggccttggcatccaaggtcactctgcccccccattaccgctatgggatgagccccccaggctctgttgcagacaagaggaagaaccccccatggatcaggcggcgcccagtggttgtggaacccatctctgatgaagactggtatctgttctgtggggacacggtggagatcctagaaggcaaggatgccgggaagcagggcaaagtggttcaagttatccggcagcgaaactgggtggtcgtgggagggctgaacacacattaccgctacattggcaagaccatggattaccggggaaccatgatccctagtgaagcccccttgctccaccgccaggtcaaacttgtggatcctatggacaggaaacccactgagatcgagtggagatttactgaagcaggagagcgggtacgagtctccacacgatcagggagaattatccctaaacccgaatttcccagagctgatggcatcgtccctgaaacgtggattgatggccccaaagacacatcagtggaagatgctttagaaagaacctatgtgccctgtctaaagacactgcaggaggaggtgatggaggccatggggatcaaggagacccggaaatacaagaaggtctattggtattgagcctggggcagagcagctcctccccaacttctgtcccagccttgaaggctgaggcacttctttttcagatgccaataaagagcactttatgagtccaaaaaaaaaaaaaaaaaaaaaaaaaaaaaaaaaaaaaaaaaaaaaaaaaaaaaaaaaaaaaaaaaaaaaatgggcccttgggccctaagctgttttcctggacccagtttttcttggaacaaaggggtaggatctgcc

SEQ ID NO: 7708 - DNA, 5625 bp, Homo sapiens
  misc_feature (3161)..(3174): n is a, c, g, or t
  misc_feature (4272)..(4308): n is a, c, g, or t
agcggctggcggcttcgaggggagctgaggcgcggaggggctcggcggcagcggcggcggctcggcactgttacctctcggtccggctggcgccggggcgggcggtttggtcctttccgggcgcgcgggggcgacagcggcagcgacccgaggcctgcggcctaggcctcagcgcggcggcgggctcgagtgcagcgcggaaccggcccgagggccctacccggaggcaccatgagcgtggaggcgtacgggcccagctcgcagactctcactttcctggacacggaggaggccgagctgcttggcgccgacacacagggctccgagttcgagttcaccgactttactcttcctagccagacgcagacgccccccggcggccccggcggcccgggcggtggcggcgcgggaggcccgggcggcgcgggcgcgggcgctgcggcgggacagctcgacgcgcaggttgggcccgaaggcatcctgcagaacggggctgtggacgacagtgtagccaagaccagccagttgttggctgagttgaacttcgaggaagatgaagaagacacctattacacgaaggacctccccatacacgcctgcagttactgtggaatacacgatcctgcctgcgtggtttactgtaataccagcaagaagtggttctgcaacggacgtggaaatacttctggcagccacattgtaaatcaccttgtgagggcaaaatgcaaagaggtgaccctgcacaaggacgggcccctgggggagacagtcctggagtgctacaactgcggctgtcgcaacgtcttcctcctcggcttcatcccggccaaagctgactcagtggtggtgctgctgtgcaggcagccctgtgccagccagagcagcctcaaggacatcaactgggacagctcgcagtggcagccgctgatccaggaccgctgcttcctgtcctggctggtcaagatcccctccgagcaggagcagctgcgggcacgccagatcacggcacagcagatcaacaagctggaggagctgtggaaggaaaacccttctgccacgctggaggacctggagaagccgggggtggacgaggagccgcagcatgtcctcctgcggtacgaggacgcctaccagtaccagaacatattcgggcccctggtcaagctggaggccgactacgacaagaagctgaaggagtcccagactcaagataacatcactgtcaggtgggacctgggccttaacaagaagagaatcgcctacttcactttgcccaagactgactctgacatgcggctcatgcagggggatgagatatgcctgcggtacaaaggggaccttgcgcccctgtggaaagggatcggccacgtcatcaaggtccctgataattatggcgatgagatcgccattgagctgcggagcagcgtgggtgcacctgtggaggtgactcacaacttccaggtggattttgtgtggaagtcgacctcctttgacaggatgcagagcgcattgaacgttttgcccgtgggatagagaacctcggtgtctggctacatctaccacaagctgttgggccacgaggtggaggacgtaatcatcaagtgccagctgcccaagcgcttcacggcgcagggcctccccgacctcaaccactcccaggtttatgccgtgaagactgtgctgcaaagaccactgagcctgatccagggcccgccaggcacggggaagacggtgacgtcggccaccatcgtctaccacctggcccggcaaggcaacgggccggtgctggtgtgtgctccgagcaacatcgccgtggaccagctaacggagaagatccaccagacggggctaaaggtcgtgcgcctctgcgccaagagccgtgaggccatcgactccccggtgtcttttctggccctgcacaaccagatcaggaacatggacagcatgcctgagctgcagaagctgcagcagctgaaagacgagactggggagctgtcgtctgccgacgagaagcggtaccgggccttgaagcgcaccgcagagagagagctgctgatgaacgcagatgtcatctgctgcacatgtgtgggcgccggtgacccgaggctggccaagatgcagttccgctccattttaatcgacgaaagcacccaggccaccgagccggagtgcatggttcccgtggtcctcggggccaagcagctgatccttgtaggcgaccactgccagctgggcccagtggtgatgtgcaagaaggcggccaaggccgggctgtcacagtcgctcttcgagcgcctggtggtgctgggcatccggcccatccgcctgcaggtccagtaccggatgcaccctgcactcagcgccttcccatccaacatcttctacgagggctccctccagaatggtgtcactgcagcggatcgtgtgaagaagggatttgacttccagtggccccaacccgataaaccgatgttcttctacgtgacccagggccaagaggagattgccagctcgggcacctcctacctgaacaggaccgaggctgcgaacgtggagaagatcaccacgaagttgctgaaggcaggcgccaagccggaccagattggcatcatcacgccctacgagggccagcgctcctacctggtgcagtacatgcagttcagcggctccctgcacaccaagctctaccaggaggtggagatcgccagtgtggacgcctttcagggacgcgagaaggacttcatcatcctgtcctgtgtgcgggccaacgagcaccaaggcattggctttttaaatgaccccaggcgtctgaacgtggccctgaccagagcaaggtatggcgtcatcattgtgggcaacccgaaggcactatcaaagcagccgctctggaaccacctgctgaactactataaggagcagaaggtgctggtggaggggccgctcaacaacctgcgtgagagcctcatgcagttcagcaagccacggaagctggtcaacactatcaacccgggagcccgcttcatgaccacagccatgtatgatgcccgggaggccatcatcccaggctccgtctatgatcggagcagccagggccggccttccagcatgtacttccagacccatgaccagattggcatgatcagtgccggccctagccacgnnnnnnnnnnnnnnattcccatccccttcaacctggtcatgccacccatgccaccgcctggctattttggacaagccaacgggcctgctgcagggcgaggcaccccgaaaggcaagactggtcgtgggggacgccagaagaaccgctttgggcttcctggacccagccagactaacctccccaacagccaagccagccaggatgtggcgtcacagcccttctctcagggcgccctgacgcagggctacatctccatgagccagccttcccagatgagccagcccggcctctcccagccggagctgtcccaggacagttaccttggtgacgagtttaaatcacaaatcgacgtggcgctctcacaggactccacgtaccagggagagcgggcttaccagcatggcggggtgacggggctgtcccagtattaaaaggtggcggcggaagagctaagcaacgtggcttagtccatcagcatcttattctgggtaataaaaaataaaaataaacggatacctgttttccactgctaaaactgaagcaccactgtgtgagcaacaggaagggagagcgcacgagggagaggagccgaggccgagcgccccctgctggcccgcggcggcgaggagcagagggagcggaggaggggccggcccgcgggagccgcggccaccaggaggccccgctccgtcccatcggggctgcggccagggcggagggaggaagaccctcatctcagagtagccctttcctctgttcttttatttctttttctctttgattgaaaggggactacgtcttagcaggaaaaaaaacttcgcatttctgtgcccgagcaggctccttgcaaagacagcagcgtgcggggcagagccccgggagggcgcgtctgtccacgcctaccggacgcgccgaggtcgcgctgcctgtgttctccgagggccttcatttaaagaaaataagggtgttttgggtttttctctttgtttttttcaagattcttttaaaggagtactgaagaatactttcctaagtttgtctctaaaatcttagcggtggacctgggagatttgagaagcttccagaaacagtttaaacaagccagcgctacnnnnnnnnnnnnnnnnnnnnnnnnnnnnnnnnnnnnngaggagttttgttgttggttttagcttccagtggcttctttctgcggggcatcaggctgctggggtagccgcccgccgagcctggaagctgctcgttctccgctggactcagaagccaagctgcttcccgcctagactcggcgcagggccccgcaccggtgaggaaggtgcttttggccccattgcgaggggccttggccaggactggccctgtggccaggaggcgagaaggtggctgttcccggattgacggctttttcccgggggcctttggaagatttggtggaaggacaagagggcctgtccctgtccccgtccccaggaggtaccgacagtccctgtgctggttagacacggagcgctgcacaccgaaagcccaaattgggagctctgcctgccggcaactttgctgatggggtgattgctgcttctggggggtaaggaaacaagttacagaaattaccgcgttctgtgtgaagggactgagggtgtggtgtcattggcagagggtcattttaggagagctgccccagcccctcgaacgcctggcttggggtgtcattctgcctggcggccaggcctccagcttcccctgccccgggcctggggctgtcactggccctgatccgaacacctccagattccggcttctacatgggacagacggggacgcacaggccaccttccttctggcagggactcttatttattcccattgctctagggctttcggtttccccttcttccggtaggccgcgtagaggcatgcaccgggtaggtttccgcggtgaccccgcggcggcctgagggacgctccctgccccatcccggctgttgggctgggccgctttgcctctgcttcgccctgtgctgtgttctccagctttgtagcagcagccttgacaaacccaggcgcactgtaccaaggcaatgtaacttttgattttcggtcaatttaagttcttttgtcaccaaatattaataaacagttttgacttcaaaaaaaaaaaaaaaaaaaaaaaaaaaaaaaaaaaaaaaaaaaaaaaaaaaaaaaaaaaaaaaaaaaaaaaaaaaaaaaaaaaaaaaaaaacagaaaaaacaaaagggaaaaaaaagaaaaaaaaaaacaacaagaacaaaaaaaagaaaaaaaaaagaaagtcaacagcaaaaagaagcacacagacatacaaaaaatctagaacgaacacgcggcagagcacataaagcacagggaaacagacaacaagagaccacagaaaaagacagaaaagaccaccaaaacagggaagaagaaaaaacagaaacaaaaaaaat

SEQ ID NO: 7709 - DNA, 2674 bp, Homo sapiens
  misc_feature (2600)..(2651): n is a, c, g, or t
caagtgatctggctaggttaacaggttagaatatgattgggagaaggggaacctgtcctttaaaaaccacatactacagacatattcattatacttttagagtcaacataaaaggcatgataatgtgagtttgctaaaaggtctagaaaggctatattttctgataaagatttggggggatgtttgtaatctcttatgtaaaagatggaagcccttatttttcattctattgtctttcataatttttctttatagtttcatactgtgaaaaggcatgaagatttctgtaattgttacatatttttgttgattttgaaagtacttgaattcagtttttaaagaacaattatttaagatggcaggtgaatcagtaaataagtaatactttgtaaaagcatctgaggacatgttagaaatgctttgatactttttatgactagagctctcagagttgtgtggcagagcatttcatacaaagaaaagttgcagaaaagagtaggccttgagaagagagggttatctgacatgctcgatactttacctcacttgtgaaggagaaagagccatcctctctacctttgttctaggtggatattctcttgctgtcagaacaccatccatttttgtagcccaaagaacaatgtttccatagtataaagttgaaaaaaaaaacaaactatattgaagcctctttaaagacaagataaatacagagagttatgttaggagtataacaagtaatattatgtctcaggccttctaattgaaatgctaagctaagcttacttttttttttttgtaacggagtctcgctcttgttgcccaggctagagtgcaatggcgtgatctcggctcaccccaacctctgcctcccgggttccagtgattctcccgcctcagcctcccgagtagctgggattacaggcatgcaccaccatgtcggactaattttttgtgtgttttttttttagtagagacaaggtttctccatgttggtcaggctggcctcgaactcctgacctcagatgatccacccacctcggcctcccaaagtgctaggattataggtgtgagccactgcacccggcctttttttttttctttttgagatggagtcttgctgtctcccagcctggattgccacagtgcaatctcggctcactgcaacctcctgacctcaagtgatccacctcagcctcccaaagtgctgggattacagatgtgagccaccgtacccagcctaaatgctaagcttacttttgatgtggtaaatttatatattctctatcccaaatacatagggagcaagtatgttcagatgtagttaaatgtttagtcccatacaccatcttgactattataaaaagaccttacccagtgagctaaattggctaggtcaaatgtggttaaaatttggctgttctggtttcaggcaagaaggggttaaaagtggaatgtatgttgtaatagaagttaaagttgcaactcaagaaggaaaagaaataacctgtcgaagttatctgatgacaaattacgaaagtgctcccccatccccacagtataaaaagattatttgcatgggtgcaaaagaaaatggtttgccgctggagtatcaagagaagttaaagcaatagaaccaaatgactatacaggaaaggtctcagaagaaattgaagacatcatcaaaaagggggaaacacaaactctttagaacataacagaatatatctaagggtattctatgtgctaatataaaatatttttaacacttgagaacagggatctgggggatctccacgtttgatccattttcagcagtgctctgaaggagtatcttacttgggtgattccttgtttttagactataaaaagaaactgggataggagttagacaatttaaaaggggtgtatgagggcctgaaatatgtgacaaatgaatgtgagtaccccttctgtgaacactgaaagctattctcttgaattgatcttaagtgtctccttgctctggtaaaagatagatttgtagctcacttgatgatggtgctggtgaattgctctgctctgtctgagatttttaaaaatcagcttaatgagagtaatctgcagacaattgataataacattttgaaaattggaaagatggtatactgtttttagaggaataaacgtatttgtggtttaaaaaaaaaaaaaaaaaaaaaaaaaaaaaaaaaaaaaaaaaaaaaaaaagggggaggaagatcaaagattttccatagggggggccaaggttaagacatacacaagtccgtgtacacacaggggaccaaatagggagaagaacaatacaaactacgccacggacgcggtgcaaccaaccgagagacgcggaaacagggcaaccgagaaacctggcatagagcacctgattaacatgaggagccggagacaccacagatggcggcacacacctgccgtccaccaaccagattctaaaaccccctcagagggtcgcacacattcaaacatctttacagcggaatcaattggcggttgattccaccaagcgagatctatagtctggatgggccgaaacagatatgaggctcccgcgcgccaannnnnnnnnnnnnnnnnnnnnnnnnnnnnnnnnnnnnnnnnnnnnnnnnnnncggagcgaacaactaccgacctg

SEQ ID NO: 7710 - DNA, 532 bp, Homo sapiens
  misc_feature (524)..(524): n is a, c, g, or t
ttttttttttcacgctgcaactgtttattccagaatcagaggttggaaacccccaacttgtatatagactgaaagcaaaacaaatacacaactgaacacaatatatgcagttatccagcaagacaggcaacgcaacacaatatatgcagttattgacaagacaggtgcacaggcacagcacacagagtgagatgaaggcagcctagcgagcagaggctctgcagcacggagggctgggaaggccatcgctcgagttaatccaatcccagtgcttcaggacaccttgggccacgttgacatctctcttttcctgggaggagccctagggtacagctgcatggttccatggagtttcaggcgtctgccagctctgtttcactgtttgtggttaaactgctttctccttttttaaaaaaaattttttgccaggtgcagtggctcacgcctataatcccagcattttggggaggctgaggtggttggatcacctgaggtcagaaattccatcgtgaccgaattcttgnccttgagg

SEQ ID NO: 7711 - DNA, 6881 bp, Homo sapiens
  misc_feature (1977)..(1991): n is a, c, g, or t
  misc_feature (2242)..(2296): n is a, c, g, or t
  misc_feature (2866)..(2881): n is a, c, g, or t
  misc_feature (6355)..(6370): n is a, c, g, or t
  misc_feature (6867)..(6879): n is a, c, g, or t
gccggagggcgcccgaggggccccgggccgcggcgctcagggcccgggcggccggcggcggccccggggctggggggagtccagcccggatattgagtgcagccattgagaaaagccaaactcttgtgtgtgcgcgtctcgatagcccccaagatggccgccaatgtgggatcgatgtttcaatattggaagcgatttgatctacggcgactccagaaggagcttaattccgtcgcttctgagctgtctgcacggcaggaggagagtgaacattctcataaacatttaattgaactccgccgggaatttaagaaaaatgtacctgaggaaatcagagagatggtggctcctgtattaaaaagcttccaagccgaggtggtggcccttagtaagagaagtcaggaggcggaggctgcttttctgagtgtttacaagcaattaattgaagcaccagaccccgtgcctgtgtttgaggcggcacgcagcctagacgacagactgcagccccccagctttgaccccagtgggcagccccggcgagacctccacacttcgtggaagaggaaccccgagctcctcagccccaaagagcagagagaggggacgtcgcctgccgggcccacgctgaccgagggaagccgcctcccaggcattcccgggaaagccctcctgacagaaaccttgctgcagagaaatgaggcggaaaaacaaaagggccttcaagaagtacagatcactttggcggccagactgggggaggcagaggagaaaatcaaagtcctacattcagcgctaaaggctacgcaggcagagctgctagagctgcggcggaagtacgacgaggaggcagcatccaaggcagatgaagtcggcctgatcatgaccaacctggagaaagctaatcagcgagctgaggctgcccagcgggaggtggaaagtctccgggaacagctggcctctgtcaacagctccatccgcctggcttgctgctctccccaggggcccagtggggataaggtgaacttcactctgtgctcgggccctcggctggaggccgcgctggcctccaaggacagggagatcctgcggctgctgaaggacgtgcagcacctccagagctcactgcaggagctggaggaggcatccgccaaccagatcgccgacctggagcggcagctcacggccaagtccgaggccatagaaaagctggaagagaagctccaggcccagtctgactatgaggaaattaaaacggagctgagcatcctgaaagccatgaagctggcctccagcacctgcagcctcccccagggcatggccaagcctgaagactcactgcttattgcaaaggaggccttcttccccacgcagaaattccttctggagaagcccagcctcctggccagccctgaggaagacccatcagaggacgattccatcaaggattcactgggcacggagcagtcctacccctcccctcagcagctcccacctccaccagggccagaagaccccctgtctcccagccccgggcagcccctgctgggccccagcttggggcctgacggcactcggactttctcgctgtcccccttccccagcctggcatcaggggagagactgatgatgcccccagccgccttcaagggagaggcgggcggcctgctggtgttccccccagccttctatggcgccaagccccccacagcccctgccaccccggcccctggccctgagccactgggcggtcctgagcccgcggatggtggtgggggcggagcggcggggcccggggcagaggaggagcagctggacacggcagagatcgccttccaggtgaaggagcagctgctgaaacacaacatcgggcagcgggtgtttgggcattacgtgctggggctgtcgcagggctcggtcagcgagatcctagcccggcccaagccctggcgcaagctcacggtgaagggcaaggagccnnnnnnnnnnnnnnngcagttcctgtcggatgagcagaatgtactggcgctcaggaccatccaagtgcggcagcgaggcagcatcaccccgagaatccgcacgcctgagacaggctcagacgacgccatcaagagcattctagagcaggccaagaaggagatcgagtcgcagaagggcggcgagcccaagacctcggtggccccgctgagcatcgccaacggcacgacccccgccagcacctcggaggacgccatcaagagcatcnnnnnnnnnnnnnnnnnnnnnnnnnnnnnnnnnnnnnnnnnnnnnnnnnnnnnnnaggtggcgcccaggggccgctcggtgcccccctcgcccccggagcggccatcactggccaccgcgagccagaacggggccccggccttggtgaagcaggaggagggcagcgggggccccgcgcaggcgccgctcccggtcctgtcccccgccgccttcgtgcagagcatcatccgcaaggtcaagtccgagatcggcgacgccggctacttcgaccaccactgggcctccgaccgcggcctgctcagccgcccctacgcctccgtgtcgccctcgctgtcctcctcctcctcctctggctactctggccagcccaacggccgcgcctggccccgcggggacgaggcccctgtgccccccgaggacgaggcggcggcaggggcggaggacgaaccccccaggacgggcgagctcaaggctgagggcgcgacggccgaggcgggcgcgcggctgccctactacccggcctacgtgccgcgcaccctgaagcccaccgtgccgccgctgacccccgagcagtacgagctgtacatgtaccgtgaggtagacacgctggagctcacccgccagnnnnnnnnnnnnnnnnccaagaacggcatctgccagaggatcttcggggagaaggtgctgggcctgtcacagggcagcgtgagcgacatgctgtcccggccgaagccatggagcaagctgacgcagaaggggcgggagcccttcatccgcatgcagctgtggctctctgaccagctcggccaggcagtgggccagcagcctggtgcctcccaggccagtcccacagaaccaaggtcctcaccatccccaccccccagccccacagagcctgagaagagctcccaggagccgttgagcctgtccctggagagcagcaaggagaaccagcagccagagggccgctccagctcctcgttgagcgggaagatgtactcaggcagccaggccccagggggcatccaggagatcgtggccatgtcccccgagctggacacgtactccatcaccaagagggtgaaggaggtcctcacagacaacaatctagggcagcggctgtttggggaaagcatcctgggtctgacacagggctccgtgtctgacctgctgtcccggcccaaaccctggcacaagctgagcctgaaggggcgggagccttttgtccgcatgcagctgtggctcaatgacccccataacgtggagaagctgagggatatgaagaagctggagaagaaagcctacctgaaacgtcgctatggcctcatcagcaccggctcagacagtgagtccccggccacccgctcagagtgccccagcccctgcctgcagccccaggacctgagcctcctgcagatcaagaagccccgggtggtgctggcacccgaggagaaggaggcactgcggaaggcctatcagctggaaccctacccctcgcagcagaccatcgagctcctctccttccagctcaacctcaagaccaacaccgtcatcaactggttccacaactacaggtcccggatgcgccgggagatgttggtggaggggacccaggatgagccagaccttgatccaagcgggggtcctggaatcctaccgccaggccactcccacccagaccccaccccgcagagccctgactctgagactgaggaccagaagccaaccgtgaaggaactggagcttcaggagggccctgaggagaacagcacacccctgaccacccaggacaaggcccaagtgaggatcaagcaggaacagatggaggaggatgctgaggaagaggcaggcagccagccccaggactcaggggagctggacaaaggccaaggtccccccaaagaggagcatcccgaccctccgggtaatgatggactcccaaaagtggctcccgggcccctccttccaggtggatccaccccagactgtccctcacttcatccccaacaggagagtgaggccggggagcgacttcacccggaccctttaagttttaagtcagcctcagagtcctcacgctgcagcctggaggtgtcactgaactcgccctcggccgcctcctcaccaggcctcatgatgtctgtgtcacctgtcccctcctcctcagctcccatctccccatccccacctggcgccccccctgccaaagtgccgagtgccagccccactgctgacatggctggagccttgcaccccagtgccaaggtgaaccccaacttgcagcggcggcatgagaagatggccaatctgaacaacatcatttaccgactagagcgggctgccaatcgggaggaggccctggagtgggagttctgaaggcagggtgagggggcaagggacataccctggtaactaccttccttctcgcacttactctcctcaacaggatggggtaagggagggaggaactcaaccatcaaaatgtggacagcaatgttatgccgtttacgttttttgttgtaatcctagttctatgaagctgtgtgagcaggtgggtcaaatgccattgcctccacttttctgcacccccctgctcctcttcaccctgacccctctgcaggaggcagaagcaaaatggcaccacatattcacctgaaaactccaaactcttttagaaaaataaataaatatttatagacctcttttagatattttaataaaggatcctttggaatttatcccagctgatgctgttttgatattacagagagttataaaatcaggatgctgtcacaactgttgcgaagtatacactgaagttgtgtcgtttttgccactagatgagattaaaagaagacaattattcaaagccatcacaaaacactataagactgaccaaaatttagataacctttgaaccacgatttttttccacatctgtctgtgagacacagcgcaatgctactgcccttccagaaactgtgctaaaaagagaaagtccaaaagactctaaacaaaaacctcgacgccgttgaggatgtgtttcattctggtggtctgttttgcaagcttgataacagaatgtccgtgccattgtaaatgttgtagagatgtgggccgtggcccaaccgtcctatatgagatgtagcatggtacagaacaaactgcttacacaggtctcactagttagaaacctgtgggccatggaggtcagacatccatcttgtccatctataggcaagaagtgtttccagatcctttggaaaggtgggcatggggcaggtgcttggagagtggcgtttgagccagagcgaccccatttcccgtgtgaaccataggcacaacccaggaagtttccccacttgtaggagtgtgggtattccagagcaagactgtggccaccatcttcccctcttggtgttttccgaaagtgacagtgttggtcatcccatgaccactgaagcttagtaaccagcgccaaaaagtagattcatcaaactagagaccccagctccccttctcgccatcttctttctcaagttgaccgtggtgctgtttctggaaggcatctgcaactccaagtccatgcagaactctggaaggccaagttcatcgcagcatgttcaccatatcccagcctccaaatctatcctcctaccttccaacgcatgacctgttggggagcagagacttaacccccaactcagaggaacccttcctccagcgtctttggcatggtttctagggtgagagttcccaatttggatagaacggccaccatattggttactgaatctctctcccttgtttttattacgtttcctttttcaaactgtccatgggaaggctgaattgagtgactccccagaatgaagatgagaaggtgaatataatcaatgccaatgtaatgccagcgggtgagatggccgatggaggtttcaaagatgtagctagcattttgaaaccatatgggcaaaacccggcaaccagaaggggacagataaggaccgttccagaaatcccaactctcacacccagcccaggctgcagtctccacaccaaacagtcaacaaaacacaaaccctgaaggaaaaccttttccatacacccaggctannnnnnnnnnnnnnnnccactgtatacatttttatccagatgaaggtatttttatattttgacaataggaaacagtgaccattttcagagtaatcaaatctggaacaaatgaaacatcttttagccaccaccaccctgttgcaattaagacaaccgtgggggaacacaccactttttactgttgaaaccaacacaacgttgaaatccaggcttatacgcagactccgattcctagagaactaaatttggctttagtgtgacgggatttgattaagcacttagtatagtcttttgaacacggaaatcctgttgtacttaaagctagcggacccgtgaacaactttgtcaggttcacgtcctataacggttaaaaaacacacacacacatacacaaaccgtttctatgagagattgatgaactttgtttaaaattttaaaaaaaggaacacgttctgtaaacgagtcgctaaatacagaattgtataataaaaaaaaaaaaaaaaaagtcgaccnnnnnnnnnnnnncc

SEQ ID NO: 7712 - DNA, 718 bp, Homo sapiens
ttttattatgtaactagagtcttcttatagagtagtggtgcccaactagcatgcctccaagtagtaatgcataacataatttatttttttccttttagaattccagatctgaacactctctcagatggaatgttgagttctgaaggttatgctaaagggatagagaagaagggctgcagcaaggtgtgagcagcaagagagggccggagaaagtctgggatttattggaacatgtatgggaattttgggctgtgggcatgagggtcacggtgggctgaaaaataaaaatttggctgtcccttgttttgcggagcccataaacttacctagggctagccacaataggaatgaacaacttaagctgcctagaggggctggggcagtgaacagaattaagtgaagatggttgtaagaatttggaaatgccctgattaagactgctctactcatagctccagctggccatgatcacacagaaacacaagcctggcatgctgaaacgccctgatttttcaaaagaagccagaaataggaattgttaggtgaaaaaatggaaatgtagaaactaatttttttaaagtattgtgaagctccaacagaacatttctgtggaccaggccttcttgaaggttgctattttgagatctctgagtgtaaagaggagatgagctgagctgagctgagctgagaacccagacagagtcctagggagccatga

SEQ ID NO: 7713 - DNA, 1053 bp, Homo sapiens
tacctacaatgtgcttattcgccgacatgctttcatccccaagcatcggagggaacaacattacaccgccacgatgtccgctctaatcccctgggattccggcccccgggaaccgtattcgaagacagtcgctcattctacagccccgctgtgcaaaaaccagtgaaagccttcagagctgagaggacactaacccatacctgctgggctcaaagggcaagcaccttctctctaaagcccaagaggagttgaggaaactaggcgtccggttcactccaggctgaaagttacaggtctgagcaaataaggtgttataaaaaatgggaatctgtcttggaggacatcagaaggtgaatttttccaagttcttggacaacctagctggtgaaaagctttctgggtttggggggtatttcagatgtaccttaaagtgttagcagacacagattaagacactgggagccaatgaaacagcagttgagggtttgctgtgtatcacatttctgtattttatcacccccttcctgcaacattatttatctggaatctacctgcccttttgttttttagatacaagggcttggttttgttacccaggctggtttcaaggccatagctttaagagatcctctcaccacagatttccaaagtgctgggattgcaggtgtgattcatggcacccagactttgctgcctttcttacatgatccaggcccagaacccaaactcaggcactgtatagatgaccactttcgtaaactactgacctagcttgttgccaattgttgattgaacttcccataactccacttcgtgtctgttcctctgtatacagccaccttctgttcccgtcatgagcctttaggtctccatttgcatattgcaaatactatgttccatgtaggtagctcattcagggccttgctcttcacttcaaaaaaggttcccttgaggactggctgtcaatttgtgttgctgtgttggttgttgatgaaaataataaaatgattgattacataaaaaaaaaaaaaaaaaaaaaaaaaataggaggac

SEQ ID NO: 7714 - DNA, 3629 bp, Homo sapiens
ggccgagctggagctggaagaggacgaggaggagggggaggaagcggagctggacggagacctgctggaggaggaggagctggaggaagcagaggaggaggaccggtcgtcgctgctgctgctgtcgccgcccgcggccaccgcctctcagacccagcagatcccaggcgggtccctggggtctgtgctgctgccagccgccaggttcgatgcccgggaggcggcggccgcggcggcggcggcgggggtgctgtacggaggggacgatgcccagggcatgatggcggcgatgctgtcccacgcctacggccccggcggttgtggggcggcggcggccgccctgaacggggagcaggcggccctgctccggagaaagagcgtcaacaccaccgagtgcgtcccggtgcccagctccgagcacgtcgccgagatcgtcggccgccagggttgtaaaattaaagcactgagagccaagacaaacacgtatatcaagactcctgttcgtggtgaagagcccatttttgttgtcactggaaggaaagaagatgttgccatggccaaaagagagatcctctcagctgcagagcacttctccatgattcgtgcatctcgaaacaaaaatgggcctgccctgggaggattatcatgtagtcctaatctgcccggtcaaaccaccgtccaagtcagggtcccttatcgtgtggtaggattagtggttggacccaaaggagcaactattaaaagaattcagcagcagacccacacctacatagtaactccgagcagagataaggaacctgtctttgaagtgacagggatgcctgaaaatgttgaccgagcacgggaagaaatagaaatgcatattgccatgcgtacaggaaactatatagagctcaatgaagagaatgatttccattacaatggtaccgatgtaagctttgaaggtggcactcttggctctgcgtggctctcctccaatcctgttcctcctagccgcgcaagaatgatatccaattatcgaaatgatagttccagttctctaggaagtggctctacagattcctactttggaagcaataggctggctgactttagtccaacaagcccatttagcacaggaaacttctggtttggagatacactaccatctgtaggctcagaagacctagcagttgactctcctgcctttgactctttaccaacgtctgctcaaactatctggactccatttgaaccagttaacccactctctggctttgggagtgatccttctggtaacatgaagactcagcgcagaggaagtcagccatctactcctcgtctgtctcctacatttcctgagagcatagaacatccacttgctcggagggttaggagcgacccacctagtacaggcaaccatgttggccttccaatatatatccctgctttttctaatggtaccaatagttactcctcttccaatggtggttccacctctagctcacctccagaatcaagacgaaagcacgactgtgtgatttgctttgagaatgaggttattgctgccctagttccatgtggccacaacctcttctgcatggaatgtgccaacaagatctgtgaaaagagaacgccatcatgtccagtttgccagacggctgttactcaggcaatccaaattcactcttaactatatatatatacataaatactatatctctatatggactcgtaaaggcatgggtataatggtaccccccagtaaacttcctaatgatttcttatgactgttatcaggctttattgggattaggctaaagttgttagtaaacttataaaaggctgctatggtaacactaaacctaagtggtctcttgtctattagtttggtttgaattattagtactatcctgtagacccagagacatagtttatataagaattgctaaagctgaagttcaacttggctgagtgaagataatcataggttgtgtgagcctatgaaaaagtgtatacgtctaagatttcaaaacaatgggtcccaaagcctaaccactttaagagtttatggagggtacttggcattacagacgattcatacacttccagtgctgccttctttacactgccagttttgacaaaacaggtttgttttttattttacaacaacatatgcctaattctgcaggattgcaagtaactttttaatgcattgtgattacttattggtaatgatagggctgatggcagtttactagatcactggttataatttgggacaaaaactgctacatcaactttcatctcgcccagagtgctcaaggctggtatgatcagtggatcaggaatgcaattgtgaattcctgcccattgcctctcttggtgaatgtggaaatggccacctgggttttcccatatcaggaagggctttgggatggcacctatattggctgataattgaggatgcaaacattccattcattagtgtgatcgagctgttaatttttagactatagatcaaaatgtgaaacattttatgttcaatccatatttgtcttgcacattataaatatatttttattttttagtaatttaggggagggaggagggagaaagggataatgatgcccttggcataatttcacaaaagcagctgtgacaacctccaatcagtttacttcatttcaaaactatttccaatcacaaggaaagatttatttaaaatatactcgtacatttcacctgtggatgtctataacttcatcctcagtatgttcccaaatctgtgctggcattgaaaggacaaaacattatactagtgggtttttctactaattattttttgaagcattattttcccaacacaaaagagcttttttctcggtataatgaaaattgaaatcctatgtgtattcaatagtaaatagacaaattttattttttatttccacttgaagagttacatttcgtataaaagtttacaaataacggtttttattttgattttttcagtataaaaaaagttgccttgatggcatattatgatgtaatgctaattgcttgtaggatagtaaatggtcagtattgaaacctaatctctagctgccgtcttgtagatatgaacgaatgttcaccaagcatgtattttgtattttgttgcattgtacactgcaactaataagccaaggaatcgacatatattaggtgcgtgtactgtttctaaaaaccacaaactaagaatgataaattatcaatatagtttagtatttgctaattttactacactcttttgttatgtatatgtagggaagtcatagggattataaattcaatttgagtaaaatttaaaaccatatattttatgataaagggcctttaacttaagatggccaaagcactgatattatatatttgctgtaaagagaattataagagttttatttttctgatattaaaagttacttaataaagacttgtttccattaacttgaaaaaaaaaaaaaaaaaaaaaaaaaaaaaacccctggttggggccccctcgggccccccgaaaaagcttttctaaaacccattcttttgtggcgccgcggcgcccctctttggggcaaggggaaacggggcccatattgggccctctcagagaaaaa

SEQ ID NO: 7715 - DNA, 2822 bp, Homo sapiens
gaaaaaagaaaatgtcagaggaatttgaagccaatactatggattctctggtagacatgccatttgctactgtagatattcaggatgactgtggaatcactgatgaacctcaaataaatttgaagagaagtcaagaaaatgaatgggtcaagagtgatcaagtaaagaagaggaaaaaaaagagaaaagattatcaacccaactatttcctgtccattccaatcaccaacaaagagattataaaaggaattaagatcctgcagaatgcaataatacaacaagatgagcgactggccaaagcaatggtcagtgatggttcctttcatattaccctgctggtgatgcaattattaaatgaagatgaagtaaacattggtattgatgctcttttggaattgaaaccattcatagaagaactcctccagggaaaacatttgactttgccctttcaagggattggtacttttggaaatcaggttggatttgtgaagctggcagaaggagatcatgtaaactcacttttggagatagcagagactgcaaataggacatttcaagaaaaaggcatcctggtaggagagagcagaagttttaaacctcatttgaccttcatgaagttgtcaaaatcaccgtggctccgtaagaatggagtgaaaaaaatagatcctgatttatatgaaaagtttatcagtcacagatttggagaagaaatattatatcgcatagatctttgctccatgctgaagaaaaaacaaagtaatggttattatcactgtgaatcttccattgtgattggtgaaaagaacggaggggagcccgatgacgctgaactagtaaggctcagtaagaggctggtggagaacgcggtgctcaaggctgtccagcagtatctggaggaaacacagaataaaaacaagccgggggaggggagctctgtgaaaaccgaagcagctgatcagaatggcaatgacaatgagaacaacaggaaatgagcccggaacgcaggcccccatgtctctgtgcaaagcctccctgcttccctctgctgagtctagggactgacttgcagcgtgctgtttaagttaagtttctctggtgcaatctgtgaagattgcctaatacttttcatgatcgatgtgttcgcattgctgaaacacaacagaagaaaaatggagtgctgggactggcagaggaaattaattgatgaaagaagaatggcccaagtttcattcgccctcagccacgcacaagggaaagggaactttgggttatgcctcctggacgcaaattaaaggccgagaaagaggccttgccatcaatggaatactgccatttatattgcttagcagggcatttgactactttatctgaggccagaactctcacacacagctatcaagtgctaagtttaaaataatcactgttggaattgtcatctgtacaattagtccataatgtttcatgtttgtcctaagtgtgctgttgctatgcagtgtgatctttatttatagtaaattatgtttcatgtaaatgatatatttttggtgaaatgcaaccttttctataaaatgtgggcaacattttaaagtttttttaaaatcctattttgataagtcagtatgccatatttaatgaaatgttattatataatttttttttcttaggcaagaaacctattggaattcgagacttaattaatgaagctttgcatcgagaaacgatgggtctgaagtccaaagtgaaacagataaaggaacttttattaaagcctgagactcaggccagaattaggagggagctttttgaaggaagacttattaacaacagtaattcagcaaatgacgttgatttcagcacaactttgacataagctctacattgcgattgtgacaacatagcttatgaaatcttttcagcttattaagtagctctttggtaaacaccaaagaagtttctgatagtgtctgcacaacagcaaaccaacatttggtgaggaattagcaatttcttgccaaagaaaattgattctgcccaattattttttgagctacacttgtgttttagaatatctgtttctgtaatattgagagttattttatagaaatgatttcttaattagctgttgtgagatatttctcgggtccttgcagaaaaaaacatacagactgtgaacaaatcattcacaaacagaataaaacagagccaacaacagtattttaagggtcacttgcctcctgttgacacaattgttgctaaatcaaaagaagcgttgtccaggtgtgtctacatctagtgttacttttaatgagaatttgaatgtttattgaacaatagtacttgaatgaacatttataaatgtaattattgcgatcactggttaagaatgttttatatatccttataatatttttcactgatcaaaatgttgttctgctttttcatttcttaaggaatacatgtttgggatttttattttttacgtgtccgaagataagctccaggtcttatcgtatcccttgccatctgaacttgtttgcactgcttctgtttgaaagagcatcttgaaaaacttccccggtatgatgattgttggtaacaactttttctatagtcattgatggagtagatcatgatggaggggaaatcactggagatcaaatatgtaaaatcatttcaaatataaaatccagtttactcatggattttagctattttttcactgggtaaattatactacatttatttacaaatgagtttatgcattttcatggctcttaataaacatattgttttccccttgaaaaaaaaaaaaaaaaaaaaaa

SEQ ID NO: 7716 - DNA, 2418 bp, Homo sapiens
ccgcagaggagcctcggccaggctagccagggcgcccccagcccctccccaggccgcgagcgcccctgccgcggtgcctggcctcccctcccagactgcagggacagcacccggtaactgcgagtggagcggaggacccgagcggctgaggagagaggaggcggcggcttagctgctacggggtccggccggcgccctcccgaggggggctcaggaggaggaaggaggacccgtgcgagaatgcctctgccctggagccttgcgctcccgctgctgctctcctgggtggcaggtggtttcgggaacgcggccagtgcaaggcatcacgggttgttagcatcggcacgtcagcctggggtctgtcactatggaactaaactggcctgctgctacggctggagaagaaacagcaagggagtctgtgaagctacatgcgaacctggatgtaagtttggtgagtgcgtgggaccaaacaaatgcagatgctttccaggatacaccgggaaaacctgcagtcaagatgtgaatgagtgtggaatgaaaccccggccatgccaacacagatgtgtgaatacacacggaagctacaagtgcttttgcctcagtggccacatgctcatgccagatgctacgtgtgtgaactctaggacatgtgccatgataaactgtcagtacagctgtgaagacacagaagaagggccacagtgcctgtgtccatcctcaggactccgcctggccccaaatggaagagactgtctagatattgatgaatgtgcctctggtaaagtcatctgtccctacaatcgaagatgtgtgaacacatttggaagctactactgcaaatgtcacattggtttcgaactgcaatatatcagtggacgatatgactgtatagatataaatgaatgtactatggatagccatacgtgcagccaccatgccaattgcttcaatacccaagggtccttcaagtgtaaatgcaagcagggatataaaggcaatggacttcggtgttctgctatccctggaaaattctgtgaaggaagtcctcagagcacctggtaccatcaaagacagaatcaagaagttgcttgctcacaaaaacagcatgaaaaagaaggcaaaaattaaaaatgttaccccagaacccaccaggactcctacccctaaggtgaacttgcagcccttcaactatgaagagatagtttccagaggcgggaactctcatggaggtaaaaaagggaatgaagagaaaatgaaagaggggcttgaggatgagaaaagagaagagaaagccctgaagaatgacatagaggagcgaagcctgcgaggagatgtgtttttccctaaggtgaatgaagcaggtgaattcggcctgattctggtccaaaggaaagcgctaacttccaaactggaacataaagcagatttaaatatctcggttgactgcagcttcaatcatgggatctgtgactggaaacaggatagagaagatgattttgactggaatcctgctgatcgagataatgctattggcttctatatggcagttccggccttggcaggtcacaagaaagacattggccgattgaaacttctcctacctgacctgcaaccccaaagcaacttctgtttgctctttgattaccggctggccggagacaaagtcgggaaacttcgagtgtttgtgaaaaacagtaacaatgccctggcatgggagaagaccacgagtgaggatgaaaagtggaagacagggaaaattcagttgtatcaaggaactgatgctaccaaaagcatcatttttgaagcagaacgtggcaagggcaaaaccggcgaaatcgcagtggatggcgtcttgcttgtttcaggcttatgtccagatagccttttatctgtggatgactgaatgttactatctttatatttgactttgtatgtcagttccctggtttttttgatattgcatcataggacctctggcattttagaattactagctgaaaaattgtaatgtaccaacagaaatattattgtaagatgcctttcttgtataagatatgccaatatttgctttaaatatcatatcactgtatcttctcagtcatttctgaatctttccacattatattataaaatatggaaatgtcagtttatctcccctcctcagtatatctgatttgtataagtaagttgatgagcttctctctacaacatttctagaaaatagaaaaaaaagcacagagaaatgtttaactgtttgactcttatgatacttcttggaaactatgacatcaaagatagacttttgcctaagtggcttagctgggtctttcatagccaaacttgtatatttaaattctttgtaataataatatccaaatcatcaaaaaaaaaaaaaaaaaaaaaaaaaagggcggc

SEQ ID NO: 7717 - DNA, 4003 bp, Homo sapiens
atgctggggaagagccatggtaggaccactcatggccctcttcctttggcggaccttggaatccaccttccctgcgttaaagtgctccaccaggtgacgccggaagagaagccagcaggcggcggcggcgtcagcatcagcggcctcctgcccgtatctatcgtggcggcgacgggacccgcctccctgggcgccggagtcatgtgacccacacaatggctgagtggctactctcggcttcctggcaacgccgagcgaaagctatgactgcggccgcgggttcggcgggccgcgccgcggtgcccttgctgctgtgtgcgctgctggcgcccggcggcgcgtacgtgctcgacgactccgacgggctgggccgggagttcgacggcatcggcgcggtcagcggcggcggggcaacctcccgacttctagtaaattacccagagccctatcgttctcagatattggattatctctttaagccgaattttggtgcctctttgcatattttaaaagtggaaataggtggtgatgggcagacaacagacggcactgagccctcccacatgcattatgcactagatgagaattatttccgaggatacgagtggtggttgatgaaagaagctaagaagaggaatcccaatattacactcattgggttgccatggtcattccctggatggctgggaaaaggtttcgactggccttatgtcaatcttcagctgactgcctattatgtcgtgacctggattgtgggcgccaagcgttaccatgatttggacattgattatattggaatttggaatgagaggtcatataatgccaattatattaagatattaagaaaaatgctgaattatcaaggtctccagcgagtgaaaatcatagcaagtgataatctctgggagtccatctctgcatccatgctccttgatgccgaactcttcaaggtggttgatgttataggggctcattatcctggaacccattcagcaaaagatgcaaagttgactgggaagaagctttggtcttctgaagactttagcactttaaatagtgacatgggtgcaggctgctggggtcgcattttaaatcagaattatatcaatggctatatgacttccacaatcgcatggaatttagtggctagttactatgaacagttgccttatgggagatgcgggttgatgacggcccaagagccatggagtgggcactacgtggtagaatctcctgtctgggtatcagctcataccactcagtttactcaacctggctggtattacctgaagacagttggccatttagagaaaggaggaagctacgtagctctgactgatggcttagggaacctcaccatcatcattgaaaccatgagtcataaacattctaagtgcatacggccatttcttccttatttcaatgtgtcacaacaatttgccacctttgttcttaagggatcttttagtgaaataccagagctacaggtatggtataccaaacttggaaaaacatccgaaagatttctttttaagcagctggattctctatggctccttgacagcgatggcagtttcacactgagcctgcatgaagatgagctgttcacactcaccactctcaccactggtcgcaaaggcagctacccgcttcctccaaaatcccagcccttcccaagtacctataaggatgatttcaatgttgattacccattttttagtgaagctccaaactttgctgatcaaactggtgtatttgaatattttacaaatattgaagaccctggcgagcatcacttcacgctacgccaagttctcaaccagagacccattacgtgggctgccgatgcatccaacacaatcagtattataggagactacaactggaccaatctgactataaagtgtgatgtttacatagagacccctgacacaggaggtgtgttcattgcaggaagagtaaataaaggtggtattttgattagaagtgccagaggaattttcttctggatttttgcaaatggatcttacagggttacaggtgatttagctggatggattatatatgctttaggacgtgttgaagttacagcaaaaaaatggtatacactcacgttaactattaagggtcatttcgcctctggcatgctgaatgacaagtctctgtggacagacatccctgtgaattttccaaagaatggctgggctgcaattggaactcactcctttgaatttgcacagtttgacaactttcttgtggaagccacacgctaatacttaacagggcatcatagaatactctggattttcttcccttctttttggttttggttcagagccaattcttgtttcattggaacagtatatgaggcttttgagactaaaaataatgaagagtaaaaggggagagaaatttatttttaatttaccctgtggaagattttattagaattaattccaaggggaaaactggtgaatctttaacattacctggtgtgttccctaacattcaaactgtgcattggccatacccttaggagtggtttgagtagtacagacctcgaagccttgctgctaacactgaggtagctctcttcatcttatttgcaagcggtcctgtagatggcagtaacttgatcatcactgagatgtatttatgcatgctgaccgtgtgtccaagtgagccagtgtcttcatcacaagatgatgctgccataatagaaagctgaagaacactagaagtagctttttgaaaaccacttcaacctgttatgctttatgctctaaaaagtatttttttattttcctttttaagatgatacttttgaaatgcaggatatgatgagtgggatgattttaaaaacgcctctttaataaactacctctaacactatttctgcggtaatagatattagcagattaattgggttatttgcattatttaatttttttgattccaagttttggtcttgtaaccactataactctctgtgaacgtttttccaggtggctggaagaaggaagaaaacctgatatagccaatgctgttgtagtcgtttcctcagcctcatctcactgtgctgtggtctgtcctcacatgtgcactggtaacagactcacacagctgatgaatgcttttctctccttatgtgtggaaggaggggagcacttagacatttgctaactcccagaattggatcatctcctaagatgtacttactttttaaagtccaaatatgtttatatttaaatatacgtgagcatgttcatcatgttgtatgatttatactaagcattaatgtggctctatgtagcaaatcagttattcatgtaggtaaagtaaatctagaattatttataagaattactcattgaactaattctactatttaggaatttgtaagagtctaacataggcttagctacagtgaagttttgcattgcttttgaagacaagaaaagtgctagaataaataagattacagagaaaattttttgttaaaaccaagtgatttccagctgatgtatctaatattttttaaaacaaacattatagaggtgtaatttatttacaataaaatgttcctactttaaatatacaattcagtgagttttgataaattgatatacccatgtaaccaacactccagtcaagcttcagaatatttccatcaccccagaaggttctcttgtatacctgctcagtcagttcctttcactcccaattgttggcagccattgataggaattctatcactataggttagttttctttaccagaactatctatgacaagcggcgtcatgtactgtgtattcttatgaatggtttctttccatcagcataatgatttgagattggtccatgttgtgtgattcagtggtttgttccttcttatttctgaagagttttccattgtatgaatataccacaatttgtttcctccccaccagtttctgatactacaattaaaactgtctacatttacaaaaaaaaaaaaaaat

SEQ ID NO: 7718 - DNA, 5755 bp, Homo sapiens
  misc_feature (2796)..(2813): n is a, c, g, or t
  misc_feature (2977)..(2998): n is a, c, g, or t
  misc_feature (4167)..(4184): n is a, c, g, or t
aaaattattattttgaaggcgctagatctggggaccgaaagggggagggggagaaatcggaaaccgaggacaacccaaaaggactcactttgcctgatgactcaacgcaactaataatcatctccctctcagtgtgtctctctctgcggcttgtcagtgagtccggctctggctgctggcagaggcggccgagaggggagaggctggaggtgacagcttgggcggccgccgcgtttcctcccgcgcgcggtcccgggtccctgcgtcttctcggctcttggtgttaccggtcccaccgctctggccgcgcctcctcgcgagctagccgccctgcgaaccagcagccccggctcgccgccgccgccgccgcctccgggttctcagccctttctctccagaacgggtctccttcccgaaggtgtgaaaaggctctttcagcctccttctcttcccccctcctccgccgtcccctcccccgctcgctcgggtgtccctttggaggagtcctttccctctcctcctcctccccctcctccctccccccatcatcatcataacaaccatctccgcaccagaagaagacaccctgacccaggaccttaaacattaggacctggggaagagggaaggggaaggagtaaagaggaagactaggagaacactgcaaagccaagcaccagaaactttccaccctggattctctacttttgctccatggacagagccccagtgagcgaggtttcagacagttcgtgatcaaggtccctgtgcgttttattgcgacctgccggtgggaactttgtctccgagtcggagcagcatggagcggcggagcgagagcccgtgtctgcgggacagccccgaccggcggagcggcagcccggacgtcaaggggcctcccccagtgaaggtggcccggctggagcagaacggcagccccatgggagcccgcgggaggcccaacggcgccgtggccaaggccgtgggaggtttgatgattcctgtcttttgtgtcgtggagcagttggacggctctcttgaatatgacaacagagaagaacacgccgagtttgtcctggtgcggaaagatgtgctttttagccagctggtggagactgcgctcctggccctggggtattctcacagctctgcggcccaggcccaaggaataatcaagctgggaaggtggaaccctctccccctcagttatgtgacagatgcacccgacgcgacagtggccgacatgctacaagatgtctatcatgttgtgacgttgaaaatccaattacaaagttgttcaaagttggaagacttgcctgcggagcagtggaaccatgccacagtccgcaatgccttaaaggaactgctcaaagagatgaaccagagcacattagccaaagaatgccctctctcccagagtatgatttcatccattgtaaatagcacatattatgccaatgtgtcagcaaccaagtgccaggagtttgggagatggtataaaaagtacaagaagattaaagtggaaagagtggaacgagaaaacctttcagactattgtgttctgggccagcgtccaatgcatttaccaaatatgaaccagctggcatccctggggaaaaccaacgaacagtctcctcacagccaaattcaccacagtactccaatccgaaaccaagtgcccgcattacagcccatcatgagccctggtcttctttctccccagcttagtccacaacttgtaaggcaacaaatagccatggcccatctgataaaccaacagattgccgttagccggctcctggctcaccagcatcctcaagccatcaaccagcagttcctgaaccatccacccatccccagagcagttaagccagagccaaccaactcttccgtggaagtctctccagatatctaccagcaagtcagagatgagctgaagagggccagtgtgtcccaagctgtctttgcaagagtggcattcaaccgcacacagggattgttgtctgagattctgcgtaaggaagaagaccctcggacagcctctcagtctcttctagtaaacctgagggccatgcagaatttcctcaatctgccagaagtggagcgagatcgcatctaccaggatgagagggagcggagcatgaatcccaatgtgagcatggtctcctcggcctccagcagtcccagctcctcccgaacccctcaggccaaaacctcgacaccgacaacagacctccctattaaggtggacggcgccaacatcaacatcacagctgccatttatgacgagatccaacaggagatgaaaagggccaaggtgtctcaagccctgtttgccaaagtggctgcaaataaaagtcagggctggctgtgtgaactgctccgctggaaggagaacccaagcccagaaaaccgcaccctctgggaaaacctctgtaccatccgtcgcttcctgaaccttccccagcatgagagggatgtcatctatgaggaggagtcaaggcatcaccacagcgaacgcatgcaacacgtggtccagcttccccctgagccggtgcaggtacttcatagacagcagtctcagccagccaaggagagttcccctcccagagaagaagcgcctcccccacctcctccgactgaagacagttgtgccaaaaagccccggtctcgcacaaagatctccttagaagccctggggatcctccaaagctttattcatgatgtaggcctgtacccagaccaggaagccatccacactctttcggctcagctggatctccccaaacacaccannnnnnnnnnnnnnnnnnaccagcggtaccacgtgaagcaccacgggaagctgaaagagcacctgggctccgcggtggacgtggctgaatataaggacgaggagctgctgaccgagtcagaggagaacgacagcgaggaaggctccgaggagatgtacaaagtggaggctgaggaggaaaannnnnnnnnnnnnnnnnnnnnncctgccgaaattgaccagagataatgtgaacttctactaggcaaagcaatacatcggtccaaggattttctgctttcatttctttaaaagttttttgttagtttgttttttgtttttgtttttgggtttttttggctttatttttgtctttttatgtctgttttgtttttcttacccttttggacatttctttgttgcacaggatacacctatagactgaataagttcagtatttccgaatcagacatcgccttggcaaagacactaaagcgttacactttatcccgtctctatgactggatcatagtcattataatcacaggagactctgccttcattatccttgcacttaacggaagttacatcaggcaagttccaggatgaaaagacctatgaaataaatgaaggaagctacaagtgtgtgtgtatatgtatatgtatatatctctatatttacatatatatattaaaattgcatgggacagagactttgcaatccgaaagaatagactgtgaaatgagttcttaaagaaaagacttgtttatgtattaaaaaaaccacttcacagtgagtcgctttggctttttgataaactgcggcctgctctcagggtggggtgactatttttgaattcctatttattttttgtgtttgtccctgatttttttttttaattctatggcttcctatctggcagcttaatgggtaatttttgaggtatgtatttaacaaaataaacgacactgccgaaaaaaaaaaaagtgaagtgaaaacaatcagggcacattaaaatgatacaagtcaaataaatcttaaagacacaatgcacacttaaaatgactcaataaaatgacttgctacgttccgttattcaatttgtcattactgtagtgaacagatgcatttctgtggaattccaaataagtaaaactgaaattcagtgcagagaaaactttgtccactagtgcaagtcttgatcaaatgacattttgacattggacatatggaattcatagtatgagccacattttgttgtgaaatttatttacctgcttgtggcttcaaatctgaaaattaataagcctgctcgtttaaaagttgtttgttgttgctgtttttttgtctttttgttttttactagaaaatagttcagtgtaatattaagttnnnnnnnnnnnnnnnnnncagttaaaggggctccctctcaaataaatctccatccttccctctcccaaaagacatttctgatttctgcttcactttgggcttcctcttcttcgtacacattccatctacctaatcaaacattttcagtccctgatctctcctgtcccttttcctgggatgacagccctaacaagaactgtttttgaatcgttgtgcagctccaggcaatagagtatgtgaagcgatttcagtagaatcacttactcatcctaaaagaaaacattatcccagttacctacatcgcaattaccttatgtaaagcagaactaatgctgactggatgtttaatgggatgagcattaaagctgcaatctactatagtactccagatctctttcggcttcctatgagaaacaccagaagcattactttccacttctacttacagtaattgcaagaggagacctcacattcaggactggcctagtgaacgtaatccatgctttaaactggccattaaacagtcccacatggttggattttttttttttttttgagttgtgctttcacaaaaccttgtcaaagacctcatgcaatatcactttgaaagttattttctgtttactacacaaacattgtaatataactgttaatactatttatatatttgaaaggtataaaaggtaggagttaaaaaaaaaacctctatgtgtagatattaactcagaacttacaatatacagggagaagacatgttgcaatacaagctaattctagctgctcagtaacctctggagtttttaaagggacattttcctgtactttttcaaataatgatgtttaaaaattatcttgacataagcgtcatatacctttgcaaaaggatggttgtttgcagttagccctggccccatccttcctatttctgtagtatgctgcagcttaaatcagaaagtccatggttgctgcttcctgatctccgagttactctttccaaattgtcttcttacactgttgctgaaggtcactctgtacacgtaatggaaactgattttgccaagctcttacaaggtggttcatctatcgatggcatccgcatttggtatcttttacacttcaaccaaaaatttattaggtatttttcaatgctaagtcttgccttttattttttaatttcactgccaagtttgcagtggttctaagtgaatctgtgggcattttagcctgtggtcttgccagatctttgcgaattacaatgcatatatgtctatttattcaatatctgtcatataatatctatttggaagaagaaactttctcttgtagtgcctcttgacaaagcacaatttcccgcctttttttttttttttgtgaaatgaaaaaaacaaattgtgttttattgcggtatcaacaatgtgaataaggattaacatattgtaaatgttcttttttccatgtaaatcaactatctttgttatcactaagtgataattaatttttaacttatgtgcattgttaggctgttagaattttttggttgttaaaataaacgcattcaataaatatgaaaaaaaaaaaaagatatttaa

SEQ ID NO: 7719 - DNA, 2437 bp, Homo sapiens
  misc_feature (1863)..(1906): n is a, c, g, or t
  misc_feature (2319)..(2341): n is a, c, g, or t
gttggagcggcgccgcgttagcttttttttttttttttttttttttaaattaaattttttattcatttttttgcatcaaaatagtgcttaaaattggaatttatactcacaagacatagctaacatccaaagtagacaattaaaaaatattatttgaaaattatgtacttagtactgaagacttcctaaatttgcacattagctagattgccattagcaccattagagagttgatctttggctaatgattattcaggaaaatttcaaccattacaatcagtgagtataattttatatttcagcaacgatagtggtcatgttcagcaacagcttcacttacaaattaaagtaagctcacttcagtgttgcactctgatgctgtttttttaccccttctcttgcaaataaccagtgaaataaaaattgcttctaactggcaatcgaaacaagggaggaattatggctagccaactagttgctaatgtttgtgttttttttatttaagaaacattttaaataatagagatggggtctcaccatggtgcccaggctggtttaaactcctaggctcaggcaatcctcccactcggcctcccaacatgctgggatcacagggtttagccatcatgcccggactgctaatgtttgtgaaaggcaaattgtaaacttctatggtttaacttcaccagaagggtaaagggctccccacctgccaccttgttctataaaaaaagtatactctgattactagaatggatttttaaaattcaattcaaagattcaataactatcaacatttctaaacactgatttttctttttctctttttcaaatgttttttaatatcctgcaggtaataacactgatttttctaatactcagaaacatctacttagcagttgtgatactaatttgcaaaatgtaataatgttatacaaatataagatactactaaatacatagtagaaataattgcatgattcctgatatttatattcaaggtataaacatgactgatttcgctgatactacagaataaaaaaaataaagctgctatgtaaaaaattaaagaatatctcaattagatatttttgttcccaatctctttcagacagatctatgaaataatatagaatatactatcaatatgttctttcatatgaagtgaaaaaaatgggatttaagtagtgagataatttctattttttacttttttaaaaaaatagacagggtcttgctatgttgcccaagctggtctcaaactcctgggctccagtgtgcttcctgcctcagcctcccaaagtgctgggattataggcatgagccattgtgcctggcctgtgggatcatttctattggttttatatcagtattaattaataagtcaatcaattaattaaccttaattatttctttttctaaataagtatcagctgatttaatctcgcccaattgaatgcgtctcttttggttgatcaatgcgatagagaaactctgcaggtaagaagtatccaagatattccactatatctggagtagtgtcataatggtagtgtccaccttctccatgacgactaaaaaaatgagtgtgctccagtcgcaaatcaaaccctgggtctctggagacaaaaactggtagacaaaccaaaggagctttcatttcataaaaatgcaaccatttattcacttcttcatcagagttcaaggggcaggaagaaaattctgcaggcttgccaggttggccttcactggcaaaaagattagccagtaatgcacactgaaaatcatgacatttctcactgtatttctccagtaggcaccctccatctgcagggttcacatgggcaaagtaacttccatttnnnnnnnnnnnnnnnnnnnnnnnnnnnnnnnnnnnnnnnnnnnnaactcagaattgaacccgagagtctgaaatggacctgctcctgctccaagaataaaggctccaggcagcttgatttcttttgcaattttattcagatcataaacttttttttggtttacaagaggcaataagtaaggcacacctccaacttctgcaattctagttttcccacagatgccttttacaggaaaggtaaagggttccttagtcaaatcagggcaatcaactacagagacctggacatcagcaaagttatcttttaaccccttctgcataactccagcaagctcttcaagacttggtacatgaaaagaaaactcagcacaagccattttctttcttctttaggtgtgaggttggacaaatagagctactcttggttaattatcacaagagtccacagcgcaccaagnnnnnnnnnnnnnnnnnnnnnnntgttcagtgatgaaaacacccagagtccggatcttcgcctaggccaaccccgcctcctcaggatacgcgagctagagctccgcccacgttagtcag

SEQ ID NO: 7720 - DNA, 647 bp, Homo sapiens
gtttttttttggtttttttttttttttgtattttcagtagagacagggtttcaccatgttggccaggctggtctcgaactcctgacctcaactgatccacccaccttggcctcccaaagtgctggtattacaggtgtaagccaccgcacccagccaatataggacatattttagttatataagttcattctgctttgtccagtaaagcaatgtaatctatcctaccagtaagtagagactacctacacagtagtgaaagatctagccatttcaagaggtcaagggacaattctgtaaataaattgcatctaagtagttccttactactcacaacatgctctaatagtgtgaagaaattaattcttatcccaaagaatatacttttcctagtaatgataggcttcatataattggaatttaagaatgctttaacaattctaccatactcaggggtaaatgacatgaattcatatatattgtactagtttaatttcataccacctactctgaggaagatttcttgctctgtttgaaatttgcagcaaggggcacttaaaaataataacagactgaagaaatttttgggcaggaaaggaagaaagttttcattattaagtgtggacatactcctctgtggtagacaagac

SEQ ID NO: 7721 - DNA, 500 bp, Homo sapiens
tttttttttttttcatgttattgagtctcactgtgccaagggcttaagttgacatagcaaatatgaggaatacagcaataatattattaaaatatgtaatagaaaatggataaaaatatttaagcatagcacacatagtattacttttttgaaatttttactttagtatatatattacatatacacacagatacacatatatacttgtgtatgtgcacatatgtgtacaggatcctgatataaggggcatttttttactggggctttttggggaaaaaattctggaagccactgtcctagaataccagagcaccaagaatacattgtgtatcagaaggagcatcaaatttggtattgaatgggatcagttcctaattcgctcctgtgtacaagagcagagtgatggcaggcacgttcctcactcaccagcacagtgacacccagtggcaggcactcaaagctttgttaaattgacatgagttgatttgatctggacaggg

SEQ ID NO: 7722 - DNA, 2695 bp, Homo sapiens
cgcagtggtctttctagggggacgacctgagatctgattggcagggcagaaggtgaccaaaataattcaggagccccctcataaaaaggagtggaggaattggaagaaactaaggcacccaactccgacaatgctgtcgatccaaaaagtggcaatttctctatgagtgcaattaaagagggacaagaatttaatggaagaaattgaatgaagatgagcctgttaaagcaaaaaaaacggaagagagacgataataaagacattgactcagagaaagaagctgccatggaagctgaaattaaagctgcccgagaaagggccattgtccctctggaggctcgaatgaagcagttcaaggacatgctgctagagagaggggtgtctgctttttcaacgtgggagaaggagttgcacaagatagtttttgatccccggtacttacttctcaatcctaaagagagaaaacaggtgtttgatcagtatgtaaagaccagggcagaggaagaacgcagggaaaagaaaaataaaataatgcaagccaaggaagatttcaaaaaaatgatggaagaagcaaaatttaatccaagagcaacttttagtgaatttgcagccaagcatgctaaagattcaagattcaaagcaattgaaaagatgaaagaccgagaagccttgtttaatgagtttgtggccgctgctaggaagaaagagaaagaagattcgaagaccagaggtgagaagattaaatcggatttctttgaactattatctaatcatcacttggacagtcagtctcgatggagcaaagtaaaagacaaagtagaaagtgatccacgttacaaagcagtagatagttcatcaatgagagaagaccttttcaaacagtacattgaaaaaatagccaagaatttagactcagaaaaagaaaaggagcttgaaaggcaagcccgcattgaggcaagccttcgagaacgagaaagggaggttcaaaaggcccgttcagaacaaacaaaagaaatagatcgagagagagagcagcacaaacgagaagaagctatccagaatttcaaagctcttctgtctgacatggtacgttcttcagatgtgtcatggtctgattttggtaggacccctccgaaaagatcaccgctgggaatctggatccttattggaaagagaggagaaagagaagctttttaatgaacacattgaagcacttaccaaaaaaaagagagagcactttaggcaacttctggatgaaacttctgcaattaccttaacatccacgtggaaagaagtaaaaaaaatcattaaggaagatcctcgatgtattaagttctcctccagtgacaggaaaaaacaaagagaatttgaagaatatatcagagacaaatatatcacagccaaagctgacttcaggacgcttttgaaagagaccaaatttataacatatagttaatttagtgaaagatgtgaaagtgaaagcttgtgaaagatgctgggattggcagccccgcagactgaagtcctctgttcatccacagaacagatccaaaaaattaatccaagaatcggatcagcacctgaaagagggagaaaaaattttacagaatgacaaacggtatctagtactggactgtgtgccagaggagaggcgtaaactgattgtggcatatgttgatgacctggatcgccggggtccacccccacctcccacagcatcggagcccacgagacgatcaacaaaataattctaaatactcttccataggggcatctattcaaaatgcttgcatgagccaattttcaggtttttacatatatgtgcattagtcaacctattgcgaaaccatctgacaaacagaaggagaagcatttgtgaacagtttctgaacagaacactttggaaatatttatgcttttctttgtgtggcatgactgacatacatactcaaatataggctgtctctagtaaatcttaaaatcttgaagctaaaattcatccttttatgaggtgtggaagtcagtgacttggtgacgttcttcctagcagtgttaatacatgcaagaagtaagagcatttgtggcttgaacttgccagatgcaaataccacagactccaagaaaacccgagttggggtttgttttgttttgattttttttttttaaagcgggtaaaagagaaaacactgaaaattgaattcttatcttccagaggctacaattattataatggacaatacttttacctttgtctctaaagatcagattagttttatttgttcacttacgtgctttgattatcccctctgaattatagaccgagtcttgttgtttagcctaagagaagatttatgtagtaatttcttctcaggtatggaaccacggtcataactaacatgttggccagaatagaaccactggttaaacatattttattcaccattaagtgatctttatcaatattctggattagacaacaaattacctttctgggtgtttcttgtaaactatactcctgtttgaatgttaaactttgttgctaaagtttaattttaagatgtttgaatgttcagtttatgtatttgaactacaataaaccaaccctttttatccaaaaaaaaaaaaaaaaaaaaaaaaaaaaaacgctttaaggatccagcttacctccccggcttgcgaactctattctttttta

SEQ ID NO: 7723 - DNA, 2720 bp, Homo sapiens; identical to SEQ ID NO: 7426

SEQ ID NO: 7724 - DNA, 5582 bp, Homo sapiens
  misc_feature (2082)..(2099): n is a, c, g, or t
cccgggccaccgcctccgcccggctgcccgcccggactgtcgcggcccgcggtggcgacggcggccgctgcaaagtttccccggcggcggcggcccgggggcgcatcctcccgcaactgtcaagcgctggcggcggaaatgatgaggcgctggccattttccgagcccgggtttcctgcctgagccccgctcgagcgagccgcgagcgaggagccggcgggcgggagaggacgcgcccagggcgggggcccgcccgccccctcgggatttcgagggcccgggggcgcgcgacgccatgggccggccgggcccagagctcctgtctctcagcccggccgcaccacctgggtctccgccatgaacgggcctgccctgcagccctcctcgccctcttccgcgccctcagcctccccggcggcggccccgcggggctggagcgagttctgtgagttgcacgccgtagcggcggcccgggagctggcccgccagtactggctgttcgcccgggagcatccgcagcacgcgccgctgcgcgccgagctggtgtcgctgcagttcaccgacctcttccagcgctacttctgccgcgaggtgcgcgacggacgggcgccgggccgcgactaccgggacacaggccgtgggcccccagccaaggccgaggcgtccccggagccaggccccggccccgccgcccctggcctgcccaaggcccgcagctctgaggagctggccccgccgcggccgcccgggccctgctccttccagcactttcgccgcagcctccgccacatcttccgccgccgctcggccggggagctgccagcggcccacaccgctgccgcccccgggacccccggagaggctgctgagacccccgcccggcctggcctggccaagaagttcctgccctggagcctggcccgggagccgccacccgaggcgctgaaggaggcggtgctgcgctacagcctggccgacgaggcctccatggacagcggggcacgctggcagcgcgggaggctggcgctgcgccgggccccgggccccgatggccccgaccgcgtgctggagctcttcgacccacccaagagttcaaggcccaagctacaagcagcttgctccagcatccaggaggtccggtggtgcacacggcttgagatgcctgacaacctttacacctttgtgctgaaggtgaaggaccggacagacatcatctttgaggtgggagacgagcagcagctgaattcatggatggctgagctctcggagtgcacaggccgagggctggagagcacagaagcagagatgcatattccctcagccctagagcctagcacgtccagctccccaaggggcagcacagattcccttaaccaaggtgcttctcctggggggctgctggacccggcctgccagaagacggaccatttcctgtcctgctacccctggttccacggccccatctccagagtgaaagcagctcagctggttcagctgcagggccctgatgctcatggagtgttcctggtgcggcagagcgagacgcggcgtggggaatacgtgctcactttcaactttcaggggatagccaagcacctgcgcctgtcgctgacagagcggggccagtgccgtgtgcagcacctccactttccctcggtcgtggacatgctccaccacttccagcgctcgcccatcccactcgagtgcggcgccgcctgtgatgtccggctctccagctacgtggtagtcgtctcccaaccaccaggttcctgcaacacggtcctcttccctttctcccttcctcactgggattcagagtcccttcctcactggggttcagagttgggccttccccaccttagttcttctggctgtccccgggggctcagcccagagggtctcccagggcgatcctcaccccccgagcagatcttccacctggtgccttcgcccgaagaactggccaacagcctgcagcacctggagcatgagcctgtgaatcgagcccgggactcggactacgaaatggactcatcctcccggagccacctgcgggccatagacaatcagtacacacctctnnnnnnnnnnnnnnnnnnccaggcctcaacagctgcccttgaggagcacaggcagaagtgtgaacttgtgaatgtaattgatctttccttccttccagagaaagatttaagggacactgttaactgctcgtgccagtttggaagtgacccttctattaggcctgttgaagggccctcctgtaggtttcatctatccacctggctttctccttattgtttacagatgtagttcttgttagaggatgccgctagctcctgcccggggtccctatgcccagtccccgttactcttagagaaaggagttggggtgagggccagagctggcagtggaaacttgttctctttttcactgacactgtcacagcggatgacagactttctacggggaggagggggggatcatcaggaagcccagaacactaacaagcggttctcccatctaccgtcagtccacatggcaggtctgctgtgtccacaccacagatgaccacatctaatcctgcttctactctcagctttaggacaaaagctctgtcagaggcacaagctgaaggtcaaaaatgatttaaaacattttacctcagactaatttctttaaaggattcaggttcaaaacttaaccactgcttatttcagtgcactgtttcaactaacacccatgctatttttgtagtcagaaacagctatgcaaaccctacctaatttacagtctgagccagcatgctggcttgtctactgcatcctcgggacagtcacctgccactgagtggccactgtccttcctaaatgtcaagaagtgaagtatgtcaccctttcagggaaattcaggcaattactgaaataggaaggtggcaagaacagttctatcctggtgccttacgaataaaaaactggattctggtttacagcagctttacagtgatagttaaattaactggggctaggggaagagcaagcaaaaagggaagaaggactcctaggccctttctagtaaatccttcagcaacaaggctggcttggtgccctccaagcatctaatggcttattaaattatcccacaagtgggttttaggctccttttttgagccaaaatggaagctgggaatctggtgccataactaatgagaaactcctttaatagcccacaatcagtgttctgttctagctggctactgcttcactggattgagaatctatctatctccttgcacacatgggcacacacaatctccaccatccagggaggtcctgaagtcaaatctctatctatacaagtgatacaattcatagggggctggctcctcccagaacctgtctggaggctcagaaacgggggcagtgacagtggagtcagctgctcttgggtgccagcagagccattcagtacaacccccaggctcacagcagtggcttctaggaaactgggagtttagatcagctttacagatacatcgatcagaggctaaaatgaaacctcagcctaaaactcataggactgactgcctgggaggagggttaggtctgcttcttccacttatacttagtctctgtgctccaagaggtcaaatttttgcttctagaatttccttggggtctttcagagggtgggggaacaaacccctatgcacttttctttttttttttttgagatggagtttctcttgtcaaccgggctggagtgcagtggtgcaatcttggctcactgcaacctccaccttcctggttcaagcgattctgcctcgacctctcaagtagctgggattacaagcaccagccaccatgcctggctaattttgtatttttagtagagacagggtttcaccatgttggccaggctggtctcgaatgtctgacctcaggtgatccacccgccttggcctcccaaagtgctgggattacaggcgcgagccaccgcgcccagcctacaccacttttagtaccaacactcttgggtgatttcatggaccctaaagcagacctgacactgatccagatttgcagtccatttttaaggacacctgtctttatttcctcaaagtcaagcagctttctctggaaaatgaatgctaattagtgtgaaccaaaagagtaagtaagagtctgaagtttttttaaaggagaaagcttattatggaaagtcactggtcctcccctccgcacaggaaaggtacccagtagataatgaaccaaattaagttccctccctccagccagaagttaaacatctgggatatgacgtcttcatgccaggggcactcatttcttagcagcctctctacatacatctctcaggtggtgccaagaggcacaccaggtagagcaaacttagcagctctgactaacaggctgcaaagtgcaagttcagattctgtggcagagatttggaaggcacccacctccagactgcttcccgtccaagttaccaggacagctcaaaaacatgctgacagaaaactcccatggctctaggaagaagtgacactaagccaacacctttctttatgtgggagcagaatcagctgatgaaggggtgggcagcagtgtggggcaggcaccccactggctgcagctagcccaccataggcacagcacatcccaccactctccttccagtcctgaccaggccccagccggcaacttctaccgagagccatggctcaacaccaaactggacagtagacatcatgatccctccagttagctctaattacagaccccaccagtacagcttgacagctcccggcaccatcccttccttcatctgacttattgaacttttacaaactaacagtcaccagcaccaaagaattaagtcaactaacctgccttgaattttagaccagcaatccatatggctttatctggtataaatcttctgcctttgatcatttctggaccgtaggaaaaaggaatagcaatcattaaaatcttgggccagagaacactatttttacataacagtttcttaacctaaagtcaaggccttggactcttccctgagggttgcctgagattccttcatgctttctattcaggactaagtcccttactgcaaatgtgttagctctaacatctcccacaagctagaggaacttgcgagtatattaacaaggacacatctgacatcctgtgtttggttagaatatacagcacattgtgataacataaagtggattcatcttgtatcattataggcagaaggtatttggcaaatttttatgtattgttttatgtactgtacaagtaacttattcttgaataatgcaaattttgctataatgtacaaattgctatatgtgaattaaaaagttttcagaatcttgaaaaaaaaaaaaaaaaaaaaacgcctcggccagccaagcaccaacacaaaacttcggtgcgccgccccgccaagattttaaacaactgggggcgcgccacgggaacgaacagcgccaccgcccacaacacccgccacacgggggtccacaaagcgcgcggcccgcgacaccgagggg

SEQ ID NO: 7725 - DNA, 986 bp, Homo sapiens
agctcctcaaagccttacctgttttgcctaagaggagtgtccttcattcgtacctatagaaacactacttggcaacagtgaatgttctctgacacatgtaataggttgttaagtttctctatttagagtccattggtagtcaagaccacctgggtgctgtttgcaagacataactatcatggaagtatttaatactatactattggtatagcaggtacatgatatgctattagtgctgtagaaatgttatgttagagacgggaacctgaagcccctccttgtggcacatagacaacctttgttttttcctataatcctttccaccttttccttggggtaatgcccctccaagtgtgctctcccctgggactcagctgcctaggccttccttcttagccactattagctgagagcagaggcagcagctctggcttggcagtggcccctggagctttgacatctggaggggatgaggaccccgttcggatgactcctgcccttccctacccaggctgtttgactccttgatctcgcctagtactttttctcaatatctaattcctgagcctgcgattgagttgtcctgcttggacacagcccttgtgttccacatgtgtggtctgatccagtgacaaagaagttgccatttaaacatctcatcttgaagaaccattctgcctttcatgcttcatgtattgaacactgaaactgataggagtcttagctttccctgtgtgtttccaagggtttaatacatacataatgatcaagagaacctgatttaacattttgctcaccctagtattaaaaaaaaaaattctggagaaggtaataaagactaagtttaaagaatgtcttggcagttgttaaaggaaattttaattaaatcccaaaatagtgggtacatgagaataattccatttgagggtaactgttgggtgtcctcattaaagcctatacaatgcatcgtatgaattttctcctgt

SEQ ID NO: 7726 - DNA, 5431 bp, Homo sapiens
  misc_feature (477)..(500): n is a, c, g, or t
  misc_feature (887)..(904): n is a, c, g, or t
  misc_feature (939)..(953): n is a, c, g, or t
  misc_feature (1300)..(1343): n is a, c, g, or t
  misc_feature (1367)..(1380): n is a, c, g, or t
gtctaactttggaaatatcaccctcatgctgtcttcccaggatgtctctctccctaagtaagggatgttacttcctggagggaatgcagtgttgggaatctgaagacccagctttgagctgaatttgctttgtgatacctggagagaagacgtgttttcttgacaacagcacagtacctagtgagttcaacaacaacgacaacaacagccgcagctcatcctggccgtcatggagtttcttgaaagagcgtatcttgtgaatgataaagctgccaagatgtatgctttcacactagaaagaaggagctgcaaatgaacacttcatagcaatgtggaactccaacagaaaccggtgaataaagatcagtgtcccagagagagaccagaggagctggagtcaggaggcatgtaccactgccacagtggctccaagcccacagaaaagggggcgaatgagtacgcctatgccaagtggannnnnnnnnnnnnnnnnnnnnnnngcttcattttcatgattgcagaggtcgtgggtgggcacattgctgggagtcttgctgttgtcacagatgctgcccacctcttaattgacctgaccagtttcctgctcagtctcttctccctgtggttgtcatcgaagcctccctctaagcggctgacatttggatggcaccgagcagagatccttggtgccctgctctccatcctgtgcatctgggtggtgactggcgtgctagtgtacctggcatgtgagcgcctgctgtatcctgattaccagatccaggcgactgtgatgatcatcgtttccagctgcgcagtggcggccaacattgtactaactgtggttttgcaccagagatgccttggccacaatcacaaggaagtacaannnnnnnnnnnnnnnnnngctgcttttgtgcatgcccctggagatctatttcnnnnnnnnnnnnnnntaattagtgcacttattatctactttaagccagagtataaaatagccgacccaatctgcacattcatcttttccatcctggtcttggccagcaccatcactatcttaaaggacttctccatcttactcatggaaggtgtgccaaagagcctgaattacagtggtgtgaaagagcttattttagcagtcgacggggtgctgtctgtgcactgcctgcacatctggtctctaacaatgaatcaagtaattctctcagctcatgttgctacagcagccagccgggacagccaagtggttcggagagaaattgctaaagcccttagcaaaagctttacgatgcactcactnnnnnnnnnnnnnnnnnnnnnnnnnnnnnnnnnnnnnnnnnnnnttttttgtgaagacccctgtgaannnnnnnnnnnnnncgtcagtttcccaaatttgacaggccaccttcaaacatgctgctatgcaatttctgcatcatagaaaataaggaaccaaaggaagaaattcatgtcatggtgcaatgcatattttatctatttatttagttgcattcaccatgaaggaagaggcactgagatccatcaatcaattggattatatactgatcagtagctgtgttcaattgcaggaatgtgtatatagattattcctgagtggagccgaagtaacagctgtttgtaactatcggcaataccaaattcatctcccttccaataatgcatcttgagaacacataggtaaatttgaactcaggaaagtcttactagaaatcagtggaagggacaaatagtcacaaaattttaccaaaacattagaaacaaaaaataaggagagccaagtcaggaataaaagtgactctgtatgctaacgccacattagaacttggttctctcaccaagctgtaatgtgatttttttttctactctgaattggaaatatgtatgaatatacagagaagtgcttacaactaatttttatttacttgtcacattttggcaataaatccctcttatttctaaattctaacttgtttatttcaaaactttatataatcactgttcaaaaggaaatattttcacctaccagagtgcttaaacactggcaccagccaaagaatgtggttgtagagacccagaagtcttcaagaacagccgacaaaaacattcgagttgagccccaccaagttgttgccacagataatttagatatttacctgcaagaaggaataaagcagatgcaaccaattcattcagtccacgagcatgatgtgagcactgctttgtgctagacattgggcttagcattgaaactataaagaggaatcagacgcagcaagtgcttctgtgttctggtagcaactcaacactatctgtggagagtaaactgaagatgtgcaggccaacattctggaaatcctatgtcagtgggtttggtttggaacctggacttctgcatttttaaaagttacccagagatgcttctaaagatgagccatagtctagaagattgtcaaccacaggagttcattgagtgggacagctagacacatacattggcagctacaatagtatcatgaattgcaatgatgtagtggggtataaaaggaaagcgatggatattgccggatgggcatggccagtgatgtttcacgtcattgaggtgacagctctgctggactttgaattacatatggaggctctccaggaagacgaagaagagaaggacattctaggcaaaaagaagactaggcacaaggcacacttatgtttgtctgttagcttttagttgaaaaagcaaaatacatgatgcgaaaaaacctctaaacgctgtgatttttaaaactacatactttttgcaactttatggttatgagtattgtagagaacaggagataggtcttagatgatttttatgttgttgtcagactctagcaaggtactagaaacctagcaggcattaataattgttgaggcaatgactctgaggctatatctgggccttgtcattatttatcatttatatttgtatttttttctgaaatttgagggccaagaaaacattgactttgactgaggaggtcacatctgtgccatctctgcaaatcaatcagcaccactgaaataactacttagcattctgctgagctttccctgctcagtagagacaaatatactcatcccccacctcagtgagcttgtttaggcaaccaggattagagctgctcaggttcccaacgtctcctgccacatcgggttctcaaaatggaaagaatggtttatgccaaatcacttttcctgtctgaaggaccactgaatggttttgtttttccatattttgcataggacgccctaaagactaggtgacttggcaaacacacaagtgttagtataattctttgcttctgcttctttttgaaaatcatgtttagatttgattttaagtcagaaattcactgaatgtcaggtaatcattatggagggagatttgtgtgtcaaccaaagtaattgtcccatggccccagggtatttctgttgtttccctgaaattctgcttttttagtcagctagattgaaaactctgaacagtagatgtttatatggcaaaatgcaagacaatctataagggagattttaaggattttgagatgaaaaaacagatgctactcaggggctttatggaccatccatcaattctgaagttctgactctcccattaccctttccctggtgtggtcagaactccaggtcactggaagttagtggaatcatgtagttgaattctttacttcaagacattgtattctctccagctatcaaaacattaatgatcttttatgtcttttttttgttattgttatactttaagttctggggtacatgtgcggaacatgtaggtttgttacataggtatacatgtgccatggtggtttgctgcactcatcaacctgtcatctacattcttttatgtctgtctttcaaagcaacactctgttcttctgagtagtgaaatcaggtcaactttaccaccagcctccatttttaatatgcttcaccatcatccagcacctacttaagatttatctagggctctgtggtgatgttaggacccataaaagaaatttatgccttccatatgtttggttacagatgggaaatgggaatgttgaaggacatgaaagaaaggatgtttacacattaagcatcagttctgaagctagattgtctgagtttgaatcttagctcttccctttattagctctgtgacctcgagctagttacttaaatgctctgatcctctatttcctgatcagtgaaacctccctattcaaatgtgtgagagtttaataaattaggacacttaaaaatgttggagcagtgcatagcatgtagtgttcagtacatgttaaatgttgttttttattatgtacaaacatgtgtgggcacagaattttaaatcatctcaacttttgagaaattttgagttatcaacaccgttcccacaagacagtggcaaaattattggtgagaattaaacagctgtttctcagaggaagcaatggaggcttgctgggataaaggcatttactgagaggctgttacctagtgagagtgatgaattaattaaaatagtcgaatccctttctgactgtctctgaaagcttccgcttttatctttgaagagcagaattgtcaccccaaggacatttattaataaaaagaacaactgtccagtgcaatgaaggcaaagtcataggtctcccaagtcttaccccattcctgtgaaatatcaagttcttggcttttctctgtcatgtagcctcaactttctccgaccgggtgcatttctttctctggtttctaaattgccagtggcaaatttggatcacttacttaatatctgttaaattttgtgacccaacaaagtcttttagcactgtggtgtcaaaaagaaaaacacctcccaggcatatacattttatagattcctggagaatgttgctctccagctccatccccacccaatgaaatatgatccagagagtcttgcaaagagacaagcctcattttccacaattagctctaaagtgcctccaggaaatgattttctcagctcatctctctgtattccctgttttggatcacagggcaatctgtttaaatgactaattacagaaatcattaaaggcaccaagcaaatgtcatctctgaatacacacatcccaagctttacaaatcctgcctggcttgacagtgatgaggccacttaacagtccagcgcaggcggatgttaaaaaaaataaaaaggtgaccatctgcggtttagttttttaactttctgatttcacacttaacgtctgtcattctgttactgggcacctgtttaaattctattttaaaatgttaatgagtgttgtttaaaataaaatcaggaaagagagaaaaaaaaaaaaaaaaaaaacaaaaaaaa

SEQ ID NO: 7727 - DNA, 4859 bp, Homo sapiens
agcgtgggggaatgtgacatcagcggcgccgggcgcttggggctggaggaggcagctcgcctcagctgcgctgtgcacacctcgcccgggggaggacgcagacccgggcaggcggcagggatgtcggcgaaggagaggccaaagggcaaagtgatcaaggacagcgtcaccctcctgccctgcttttatttcgtcgagttgcctatattggcatcatcggtggttagcctctatttcctcgaactcacagatgtcttcaaacctgtgcactctggatttagctgctatgaccggagtcttagcatgccgtacattgaaccaacccaggaggcaattccattcctcatgttgcttagcttggcttttgctggacctgcaattacgattatggtaggagaaggaattctctactgttgcctctccaaaagaagaaatggggtcggactagagcccaacattaatgctggaggctgcaacttcaattccttcctcagacgagctgtcagattcgttggtgttcatgtatttggattatgctctacagctctcattacagatatcatacagctgtccacaggatatcaagcaccttactttctgactgtgtgcaaaccaaactatacctctctgaatgtatcttgcaaagaaaattcctacattgtggaagatatttgctcaggatctgacctcacagttatcaacagtggcagaaagtccttcccttctcaacatgcaacccttgctgcctttgcagctgtgtatgtttcgatgtacttcaattccacattaacggattcctctaagcttctgaaacctctcttggtcttcacatttatcatctgtggaataatctgcgggctaacacggataactcagtataagaaccacccagttgatgtctattgtggctttttaataggaggaggaattgcactgtacttgggcttgtatgctgtggggaatttcctgcccagtgatgagagtatgtttcagcacagagacgccctcaggtctctgacagacctcaatcaagatcccaaccgacttttatctgctaaaaatggtagcagcagtgatggaattgctcatacagaaggcatcctcaaccgaaaccacagagatgctagctctctgacaaatctcaaaagagcaaatgctgatgtggaaatcattactccacggagccccatggggaaggagaacatggttaccttcagcaataccttgccgcgagccaataccccatctgtagaagaccctgtcagaagaaatgcgagcattcatgcctctatggattccgctcgatcaaagcagctcctcacccagtggaagaataagaatgaaagtcgaaagttgtccttgcaagttatagagcctgagcctgggcagtcaccacccagatccatagaaatgaggtcaagctcagagccatcgagggtaggggtgaatggagaccaccatggtcctggcaatcagtacctcaaaatccagcctggcgctgtccccggatgtaacaacagcatgcctggagggccaagagtgtccattcagtcccgtcctgggtcctcacagttggtgcacatccctgaggagactcaggaaaacataagcacctcccccaaaagcagctctgctcgggccaagtggttaaaagctgctgaaaagactgtggcctgtaacagaagcaacagccagccccgaatcatgcaagtcatagccatgtccaagcagcagggtgtcctccaaagcagccccaagaacactgaaggcagcacggtctcctgcactggctccatccgctataaaaccttgacagaccatgagcccagtgggatagtgagggttgaggctcacccagagaacaacaggcccatcatacagatcccgtccactgaaggtgaaggcagtggctcctggaagtggaaagcccctgaaaagggcagccttcgccaaacttacgagctcaacgatctcaacagggactcagaaagctgtgagtctctgaaagacagctttggttctggagatcgcaagagaagcaacattgatagcaatgagcatcaccaccacggaattaccaccatccgcgtcaccccagtagagggcagcgaaattggctcagagacgcggtccatttcttcttcccgcgactccaccctgcggagaaagggcaatatcattctaatccctgaaagaagcaacagccccgaaaacactagaaatatcttctacaaaggaacctcccccacacgggcttataaggattgagtgatgtccattccatcattagggctactcgcaaaagaccatatgttgattctacctgtgttctgttccagcgaattgggaagtctcaccaagctagattgtctaccatcagcccagaactctgtaacttttcagaactgctatactcaaacttgcagatctcacatcaaggagagggaaaagcacaatgcaagaacctaactaacgtgatgatatgaagagttttcttaagacctgtcgtcaaacttaaaaggttttgcagagggcagtatcaaaagaaagtggttttcttcaaatgtatactattttacttcctgaatgtgccaactttggggatttttctttatagtgagctgtgggaacccagaacacacacgttttccctacagcagaggccatgcagtattatatattcattttgcagaatctgcacctacagctcaatacgggtggtgctgattattatagtacatataccatgtaaactctcaaactctatttagctgtgaaatagtggtgtgcaattccttgttaaagaaatgctactttattaagaagatgctggctgctttgtgttagaataggacaccccgcagcttctctgtagtggctctgtcacagtcaaaaaatgaaaaggtttttgtgcgtttcttcaaaattctgctttcttcaacatcaaaaattgtgtagaaatattttcagtgaaagggaataactagtacttttctgcatagtttttcttctgcttactttttatttaagtataggtactgctaatgaatctgttttcttagtgagtaaatttgcataattttataaatattattttagagaatcttttgaaattgttgtgatcatattttgctttctatggcttctccttaacttattgattaattttttgaagttatagatatgttctcctattttaaaagcaaaaataacaattgacattccttgagcaaaatatactgctgtgaatttgcaaacaagaaatctgagccaaaacttgacattgtgggttacattgccagaaatgttggtcaagtttgcccttagatgtctacaactagctggcataggttgccatcttaacaagtaatctaaaagtcccattcggttctacattattaactttttttttctatatcctgatgaccagtaaattagagccacactggttaagtttgactcgtctctaaaacgtttttgttaattggacaccaagaggaagaatctgaaaaaaaaatgcatgttggtaagtaaaagtatctcacggtacaaattaagaatgactttcttcaaaatatctgaataggtgcagttttagtttaacatgcaaacaaccattgttgctacctatcctgaatcaagccttgagcctaaatcaaagcaaaccaataccattgataagaagaagataaaaacaaaatattttggagtgttttccaacttaaagtatgaagacatactcagttcttggaacttagtattaaaccttttttatgccatttcataagaattccgatatatacttgatgattgccaaggggatgaaaggaaacaacagagatggttgatctgatcttagctcactttccaataacagaaggagttgtttacagatgaatagtatcacatcattatcaatttccacatgaaaaaggtggagctttctagaaaaaccaacctctaaggcattaggaatttagctgaaaccagcagaattgaaaactctggcaataaaacatggactcaaccatatcccttctggcaatttccttctcagagaggggagtgggaataaaatgttgccttccccacttctcaccaccaccgccatcatgacgctcatactggcttttgcctgtttgtagaggaaaaggtgggctggttttagtactctgaaggacaaaaacaagcaaacaaaaacccctctggcagcattccaggtgcagtatgaattttcctaatctttcctatttcttaacaaaagattttaaagtacttctctagtcattgaagtttttttttctttacataaatattgatatattctttttctactcaaagtgccaaaggctacagtttttaatgacttaacaaattgtaccacattgttaaggacatataatgatagacactagaactcagacctctgcatgtatatttgataacatgtcttttgtaaaacaaaaattacaaaaaaatttgtttacattccactggtaccttaatttaaaataaatcagactaaaaggtggtatctcttcttagtgttctatttatcttatttgctaatgggagcacttcttcctttgttaggctgtgctttactgataaaaccaagtattgaataaagagagttaattatctttttaaagtaaataaaattatgaaaatatatatagtatatataaagtactgtgtttaaaaaaatgttatgcaatgttttccaaactgataaagtttgtaaagtgctataaatgtattttgttaagtacagataaaagctattgtgtgagtatattgtgctaaaatcatagaaataaagattagatttcttcatcaaaaaaaaaaaaaaaaaaaaa

SEQ ID NO: 7728 - DNA, 3897 bp, Homo sapiens; identical to SEQ ID NO: 7332
  misc_feature (3379)..(3380): n is a, c, g, or t
  misc_feature (3386)..(3387): n is a, c, g, or t
  misc_feature (3390)..(3390): n is a, c, g, or t
  misc_feature (3393)..(3393): n is a, c, g, or t
  misc_feature (3404)..(3406): n is a, c, g, or t

SEQ ID NO: 7729 - DNA, 2030 bp, Homo sapiens
  misc_feature (860)..(935): n is a, c, g, or t
agcgggcagtcaccgcggacgccaatcttgtgcatggagtcgccatttggctcctagagaggccgccaggagacccggcgctttcttccttctgcagctgaggctgcggcggggccggggctggggtcggggccaggaggaattttgttgtcagagaataaaaggaggttgtccataattgactttaagcagcaatcagtaaaacattgagctcttcagctccgcctttcttgctctgaaaattggaaaaccaagaaggttttgatgttttgtgtgacgccacctgaattagaaaccaagatgaacataaccaaaggtggtctggtgttgttttcagcaaactcgaattcatcatgtatggagctatcaaagaaaattgcagagcggctaggggtggagatgggcaaagtgcaggtttaccaggaacctaacagagaaacaagagtacaaattcaagagtctgtgaggggaaaagatgttttcatcatccaaactgtttcgaaggacgtgaacaccaccatcatggagctcctgatcatggtgtatgcatgtaagacctcttgtgccaagagcatcattggcgtgataccctactttccttacagcaagcagtgcaagatgagaaaaagaggctccattgtctctaaatgcttggtaccagtgattgtgccacagctgcgactaaatcactcgttattactatggatttacaccagaaggaaattcagggcttcttcaatattcctgttgacaatttaagagcatctcccttcttattacagtatattcaagaagagatcccagattacaggaatgcagtaatcgtggccaagtctccagcctcggcgaagagggcacannnnnnnnnnnnnnnnnnnnnnnnnnnnnnnnnnnnnnnnnnnnnnnnnnnnnnnnnnnnnnnnnnnnnnnnnnnnaggatgccgagtcggacttggtggatggacggcattccccacccatggtcagaagtgtggctgccatccaccccagcctggagatccccatgctgattcctaaagaaaagcccccaatcacggttgtgggtgatgttggaggaaggattgccatcatcgtggatgacatcattgatgatgttgacagctttcttgctgcagcagagaccctgaaggaaagaggtgcatataagatctttgtgatggcaactcatggcttgttgtcttctgacgccccccggcggattgaagagtctgccattgatgaggtggtggtcaccaatacaattccacatgaagtccagaagctccagtgccccaagattaaaactgtggatatcagcatgatcctttcagaggcgatccgtcggatccacaatggggagtccatgtcctaccttttcagaaacataggcttagatgactgagttttcctttaggaaaactcccgagggccaaactggaaacataagagtgactgctcggtgggatggatttcacaggaaccgtcatgcttgttcctccctctcccctgtaacctcacttcttattgattcctaagaagatagaccaactttttatgtcggtttgggtgtttgtgagtttggggagcaatttttataaaagaaaaactttattctcctcttttgaaaaggtaagacctcgttttagttgtaactgtttaaaaaataacacttggaataagatttgtaagctcacaaagccttcttccaaagttgcttgagccaagtgcttaaaaagttaataaaataaaatgatctgtatgatacctgcaattgaaaagccgaaaagattatactgtcaagtccagtaaatgacatttttagagatgcttttgtagacaagcatatggaatatgtgattgtatttattttctgcaactaaaaaaggaataaaaacttgtgtttgtgtgtttttctaaaactttgtgttttggcaatcgttttataactaaaataaaatgaaagctaaatctaaaaaaaaaaaaaaaaaaaaaaaaataaaagggggaaagtaaaggttaccaagttatta

SEQ ID NO: 7730 - DNA, 2815 bp, Homo sapiens
gggagtaggtcagacagggttttcactgtctagatttagctggttagattttcctctaaaatcttaagcagatgctgaatccataaagccaaggagtgctgagggctggagtgggtgggccctccctcccacagccccagggagatacatctggactcctgggaatctggattaagaaagttgggatgaaagaggaggactgctcaggccagttgtgagccagggagaatgttccagtctggttttggtctggtggctcctagaaagggatgtggcccagaagtgggactcaaacagagagatgaagtaggggaggggagtcctccacgggcatctctctcctggcggctggatagctttaccctagggtggggccagccctgacaccctcatcccctcctcagcccagcagcctctagagcagcgtggtgctctcttgatggccaggaatccagaatctgcccttccccaaccttggtttctccttctgtaaagcagagtgatggctgagaagtcctctctagctgcagaagcctgagcttcccggtgtcagtcagctctgcaacgtgggagccttggaggcgggtggcctggctgtgcttcatatgcccaggagtggagaaggaggctgagaagctggtttcccagctctgatctccacaggcacctcctataaccctcctctcacccaccccgctacggtctgagagatctgaaataacctttcccagtgggcagggttgccagggttgaggggacagcacataccacccccacccaacctgttcgaggggccctgcatggcacgggatgagtccctgccctgtgcagctgcctggcagtggctgggacaaggatcttgcagccagcacagaggcctcttcaaaggcctctccctcttggcactccaggcaaggcaggtgcccgcttccccaacacctccaggcagtgaccctagggcatgccccagcaggtctccgagcagccactgggacccgtctcagcacatcctggcctttgaaagtctgatatcctgagaggagggcaggttttagggccgcagttccagccagcgtccccagcctggcttccctgccatggactcagtagctcgtggggcttcttaccacccaccagccccgctggggtgcggcctggctgtgggcaaaggaggacttgcctggagatttgagagaagattccttctaccagggctgctgaggggccaggcctgcatcaggggctaggctctggctgggcccggaggctgagactaaggctttcgaccctggtgcctccatgtggatgctgcctcagacaaaggcagtgagccttccctgccaaagtgcccatcccatgggctcggcctcactggtcactgttagcccatgaacacgtgtgggcctcggtcacgtggctttgagggcagtctgaccaggctagaccacacgtgccgtgacagggggtgccattcccctcgcaggctctaatgtgcccacatgtagcctggcagtccaaagaccaagaatcaacttgcaaatctgccattaaactgctgtgcgacttcaggcatatcactgccttctctgggcttcagtgtccttttcatacctagaagtctgcggtctgaggctctttgggttcagacacactgttctaggcttctgtaggggaccttgtgatctgccgtgcccctcctccctgttcttttctgtcctccccaccccaccctcagaagctgcttgctctgcccccaggacaggagcttgacggatgaagtgcagccagccacccaggtgccatttccagtctgacttccagaaatgtgcaccatgtcctagagcacagacccattggctggagcctcctgggagggttcaaaccatcagctctatgagaaatgcccagaaaggctttgccgactccatccgtctgtggaggctgcctgcctccggggtgggatgggtggtttctcctccaattcagacccaagaggtagcccccgagggcatgtacctggtgggaagcagctcaggtacccttgggggttgcagggcccttacgcaggtatttctctctctctcctctctggggtgcgtgtgtgcgtgcgcgtgtgcgtgcctatgcttttctctgtgggcacatcaggatgcccctcggagagcatgtgcacgtgtccccacctgagcgagcgtgtgtgtgtgctcctctgcgtcccaggtttggacgtctagggtttggtgtgcctgtcttctgccctccctgagcccacagggtcagtcaatgtatcttctacgtgcctctccctctgccttctctcacagtgcccccggctccagagctcaggggtaggggttctcctgagggtgcaggggatccttctcatctcctggaccctccagggcactctggtccctattccccagctcctaggcagctgagccgggtcccttaggggaggtgaccaggagctttggtgcagggagctcttggtggggcaaagggctggacccctgccaggtctgtggacatggttatatgcccgggagaggggggtgcagggccccagggatggcccccaatcccacctctgtttattctgtaaactgcaacctataaataacctttagcattccctattgtaaacaaaattaatttttatgaaataaattatatttcctagtctaataaaatccgggttgcatttaaaaaaaaaaaaaaaaaggccggccgcctcctaagaaatattcccctcgaagggggcccaaaacctttacccggtaaccccaactctttctttgtgtaccaaaatggc

SEQ ID NO: 7731 - DNA, 2486 bp, Homo sapiens
acttgggttgcggaggccggctggccggagtcacggttggggacgggcgcgcctcggagcgcacggctgcgctggaagccgcgtctggggcgcaggaccaacgggacctacctcctcccggctacctaaagactccttctctcgggaaagagcgctgcccggctctgggatttgggaggagctcggaggccgctcgggcacctcgctggacactatccgtttgcgccccggtggcgcgggagggtccggagcggagcgctcgtctctcctcagcggtttagtggagaaaagcagagagctcttcctggggcgaatgggacctcctccctcggtcctccgtggagtcgtcgcatcgcttgtcgtgttggtctcgaggggctcacagcttggcactaatttgcaggtgttcgctgctgatttggtttcttcttcgatttgcggacggttccctccagcgactctcgacacacgttttcctgtcttcgccggagggccgggtctggggtcgccggagcctgcgggaatccagcgcttattcgctgaccctcgagtcgcttcgctagctgtgcgccctcctgggcactagcctggagaggagcgtgcagacgcggctccttggagggagtgcggtcctctagggaggcatcgggctcctaggggcttcttggcgtgtgtggtgggattggggtccgccggccatggccttcactttcgctgcgttctgctacatgctgtctctggtgctgtgcgctgcgctcatcttcttcgccatctggcacataattgcctttgatgagttaaggacagattttaagagccccatagaccagtgcaatcctgttcatgcgagggaacggttgaggaacatcgagcgcatctgcttccttctgcgaaagctggtgctgccagaatactccatccatagcctcttctgcattatgttcctgtgtgcgcaagagtggctcacgctggggctgaatgtccctctacttttctatcacttctggaggtatttccactgtccagcagatagctcagaactagcctacgacccaccggtggtcatgaatgccgacactttgagttactgtcagaaggaggcctggtgtaagctggccttctatctcctctccttcttctactacctttactgcatgatctacactttagtgagctcttaacgcaaagaccatgcacatcatcagagactgagatgggagaggcctgagacggagaggtgcatttctgctggtgactggaggagggaccagaatgaggatacgtgagaaatagacccggcaggcagtcagactgaatgggagctggaatcacgcagcagctgggagccgagttaaccctgcgtgtctgtgtcaccctgtttgtcaatctttggcattcgaattccacacacggggtcctagagcccttctgagcatcagtggtgtgggggagtaggtgacgaaacactagacctctcctgagagagaattgctgcttcctgaatccacttcattgaacagcaccttgcaagttcaaatgagttcctgggagcggaggctggaaggccacaaggtgcttgctaaggaacagaatgacccagagtcaaggccaagtctgcagggacctgttgaaagcctcgagaatgtcttggctgcccaagactcttgttgcctttcttccaagccatggccatgccctttttctcaaatgggaggggctggagggtgtgtgggatttgtcttcagctgcaaccagccttgagcctgctgggctattttcagctgaggaggggtgaatataggaaaaatgcatttttgaaacgtttgcaacatgatcaaggtgttagttctccaccacacaagttgtattcttcttttgccacctcaaaccatcacagagtctttaaatgcaaatcaattggtcaatgctagtcaaagctatgttcttacaaaaaccccagacagctcagagctcagaaaatcctgtggagtggctgctctgtaccgtgggcatccggcagccaggaagtgagacaacataattataactttgttttatgatgctgcatcatttgtactgtttaggtcgacgtgaggacatcatcttatttagaattttccgtttggcattctcttttgggtgggagttatgctgggggttgtaaataatgacaaggctgagatttttatgatgtttaaattgggcacaatgattttgaccttattccccaaacttcttttcttttctactgtttaacatacacaggctatttatacacgtccccagctcccatctgaaacctgtgactcaggtttatgaatggtgtttgtgtagcaacacattgtgtgctatgtttattaaaatgcagcgacaaaaaaaaaaaaaaaaaaaaaaaaaaaaaaaaaaaaaaaaaaaaaaaaaaaaaaaaaaaaaaaaaaaaaaaaaaaaaaaaaaaaaaaaaaaaaaaaaaaaaaaaaaaaaaaaaa

SEQ ID NO: 7732 - DNA, 2149 bp, Homo sapiens
  misc_feature (1682)..(1682): n is a, c, g, or t
  misc_feature (1697)..(1697): n is a, c, g, or t
  misc_feature (1714)..(1715): n is a, c, g, or t
gtcggacgccgccgcggcgcgctctgcagactacgggtcgccgctcctgcgggacgcgttggccggggcgcgcggtgcttggctgcggtgctcacactcatgaggagccggaagctcacaggtgcagcgcggccttcagcgcgctcgaaagcacgaagttgttctgcagccaggttggcctctgcccaggaagttgctggttccacgtctgccaagacagcatgtctgacttcctcatcccacaaagacacagacaggcgaacgtccaagaagttcacatgtgacacaggacatcttgtgaagtcagaattacagaagctcgtccctaagaatgacagcgcttctttgccgtgacacctgagaccccttgtgtgtgcacagggggctgcaagagttcctctcggtggctgcagagttgtgagagactctcgctcagcacagactagagatggcctgtgcgtgccaaacacagtgccgggtccggagcagaagaatccaacagcagctccactgtgcagaagcagaatgagccagggctacagacagaggatgtgcagaagccaccacttcagatggacaacagcgtctttctagatgacgacagcaatcagccaatgcccgtgagccggttctttggaaacgttgagctcatgcaggacctcccacctgcgtcttcatcttgtccttcaatgagcagacgagagttcagaaaaatgcatttcagagccaaagatgatgatgatgacgacgacgatgatgcagaaatgtaggggccatacaaaataatgtccttgagtatttagtaccattaacaatttgacaatttagcacattacaagatttatataaaatgtatctccaagagaatgtcttaatcaaacttcagaactgacccatctaagtcaatagtgcaaagcacccaatacctgtggaggatgtactcatgggaactaaaactcaaaccatctttgaggttgcaaagctgctgtactgtgccaatgtcctttctttttttttttttttttttttccttggagacagagtttctctcttgtcgcccaggctggagtgcaatggcgcaatctcggctcactgcaacctccacctcctgggttcaagtgattctcctgcctcagcctcctgagtagctgggattacaggcatacaccaccacacccagctagtttttgtattattagtagacacgggggtttctccatgttggccaggctggtctcaaactcctgacctcgtgatacgcccgcctcagcctcccaaagtgctgggattacaggcgcgagccaccatgcccggccagtgtcctttcttatacacgtacatacatgatgatggcttgagtcagctgcagggcagtgggcttaatgagagggatctttgtaaagacagctcttcacttcagctcagtagctttggtcataggcaagtttgttttccattatcataatttgatgattcttgtgatgaattcaatgctagttcttaaagaactcttttatttctgtatgtggagctaatgtttaccttggaaattttgcaaaatacatgtaagaaagaaataaaatatattttgaaaataaaaaaaaaaaaaacaaaaaaaaaaaaaaacaacaaaaaaaaaaaaaaacaaaaaaccaaaacccaaaaaacacaaacaaacccancccccaccaaaaccnccaaccaaaaaccaacnnaaaagggggggcccctttaaaaattccccccgggggggcccaagtttatacgccccccattttttttttgaaaggggggcccctaaggggggggcttttttaaaaggggggccggggggcggttttttaacccgggggggggggaaaaaacggctcccctggggcatttttggggaaaaaccttccctttgggtgggggggaacatttgtgggcacaacccccccccaacagagattcttaagccctccagagggaaaaaaaaaattttttttagggggggcacaggggggtaaaaacaaagggcaaatatttttgccgccgcttataaaaaattctcctctcccgggcgcgttttctttttttaaacaataattatccccccggcggcggggggggggctctcccccgtgtggtgggggggcgattttataca

SEQ ID NO: 7733 - DNA, 6144 bp, Homo sapiens
  misc_feature (2127)..(2147): n is a, c, g, or t
gcggccgcagcctgagccagggccccctccctcgtcaggaccggggcagcaagcaggccgggggcaggtccgggcacccaccatgcgaggcgagctctggctcctggtgctggtgctcagggaggctgcccgggcgctgagcccccagcccggagcaggtcacgatgagggcccaggctctggatgggctgccaaagggaccgtgcggggctggaaccggagagcccgagagagccctgggcatgtgtcagagccggacaggacccagctgagccaggacctgggtgggggcaccctggccatggacacgctgccagataacaggaccagggtggtggaggacaaccacagctattatgtgtcccgtctctatggccccagcgagccccacagccgggaactgtgggtagatgtggccgaggccaaccggagccaagtgaagatccacacaatactctccaacacccaccggcaggcttcgagagtggtcttgtcctttgatttccctttctacgggcatcctctgcggcagatcaccatagcaactggaggcttcatcttcatgggggacgtgatccatcggatgctcacagctactcagtatgtggcgcccctgatggccaacttcaaccctggctactccgacaactccacagttgtttactttgacaatgggacagtctttgtggttcagtgggaccacgtttatctccaaggctgggaagacaagggcagtttcaccttccaggcagctctgcaccatgacggccgcattgtctttgcctataaagagatccctatgtctgtcccggaaatcagctcctcccagcatcctgtcaaaaccggcctatcggatgccttcatgattctcaatccatccccggatgtgccagaatctcggcgaaggagcatctttgaataccaccgcatagagctggaccccagcaaggtcaccagcatgtcggccgtggagttcaccccattgccgacctgcctgcagcataggagctgtgacgcctgcatgtcctcagacctgaccttcaactgcagctggtgccatgtcctccagagatgctccagtggctttgaccgctatcgccaggagtggatggactatggctgtgcacaggaggcagagggcaggatgtgcgaggacttccaggatgaggaccacgactcagcctcccctgacacttccttcagcccctatgatggagacctcaccactacctcctcctccctcttcatcgacagcctcaccacagaagatgacaccaagttgaatccctatgcaggaggagacggccttcagaacaacctgtcccccaagacaaagggcactcctgtgcacctgggcaccatcgtgggcatcgtgctggcagtcctcctcgtggcggccatcatcctggctggaatttacatcaatggccaccccacatccaatgctgcgctcttcttcatcgagcgtagacctcaccactggccagccatgaagtttcgcagccaccctgaccattccacctatgcggaggtggagccctcgggccatgagaaggagggcttcatggaggctgagcagtgctgagaacaccaagtctcccctttgaagactttgaggccacagaaaagacagttaaagcaaagaagagaagtgacttttcctggcctctcccagcatgccctgggctgagatgagatggtggtttatggctccagagctgctgttcgcttcgtcagcacaccccgaatattgaagagggggccaaaaaacaaccacatggattttttataggaacaacaacctaatctcatcctgttttgatgcaagggttctcttctgtgtcttgtaaccatgaaacagcagaagaactaacataactaactccatttttgtttaaggggcctttacctattcctgcacctaggctaggataactttagagcactgacataaaacgcaaaaacaggaatcatgccgtttgcaaaactaactctgggattaaaggggaagcatgtaaacagctaactgtttttgttaaagatttataggaatgaggaggtttggctattgtcacatgacagactgttagccaaggacaaagaagttctgcaaacctcccctggacnnnnnnnnnnnnnnnnnnnnntgtctgcggttgtcagccccttcctttcccccgacctaaacataaaagacaaggcaaagcccgcataattttaagacggttctttaggacattagtccaccatcttcttggtttgctggctctccgaaataaagtccctttccttgctccaactccttgtctctcaacgtattggctatgacgcagcaagcagaatgaatttggactcagttacaggctgtcaatggtctgctctgtagcagtctcagagcctccccgacccactacctggagatagccagatagccagatgccctgctcctggccacctttaaagcccctgcatatgacacaggttaactaaagtcaagattggggctgctgcattccaggttccctagactcacaagctggtccttggccaggtgcagtggctcacgcctgtaatcccagcactttgggaggctgaggcaggcggatcacctgaagtcagaagtttgagaccagcctggccaacataattaaaatgtctctactaaaaatacaaaaaattagctgggtgtggtgacgcttgcctgtatcccagctactcaggaagctgagacacgagaatcacttgaacctgggaggcagaggttgcagtgagctcagatagtgccactgcactccagcctgggtgacagagcgagactccgtctcaaaaaaaaaaaaagaaagcagaacctcatggctatagagttggcattttagccccagcttctgtagctctgaaagcctaaagaaggtattctctccatctgttaaacacagtatagtggctctcagcccttggggcatgttatcatgggagggaagtcaaataagaggagagaaaagaactcaagggggaaactgcatttttaggctttgctctcttaccttgccctttctactcagaaccaataacttctgcatcaaaacatgttacagcctgcatcaagggctttaccccaacctgcagcccagccttccctgggtgagcttgctatgcgcagccacatttaccatgtggggctccctattctgatggcctgttcggtgccgggtttactcactgccctgttctgatgtcagtgcctgtacatacctccaaaggcaggacttgcctgataaatatttttcctcctctgaactggattttataggcattaaagacaagtcgggtggctagagggctccttgagacatacctagcagggaactgcaggtggattctgttgagaggcaaagcacctgagtggttgggacacaggcagctggcatgggagggactttttttgagacagggtctcactgtgtcgcccagggcaaggatgcccaaagacaccaggttggagaggcacctgccaactacttgctttccctggagcctgcatgtgcctgtggggtggggaggcgtaggggtctacggctgcctgagatgggtgtgcacagtgtgtgaagtacctacctccttgccttgctggactgtcagccagtcgcagggccggccacaagacccatgtctccatctggtcatactccatagctaccaagttaacctgctctaaactttggagaactggatctgtccaataaacgcttatttggccaagcctgatggctcgtgcctgtactcccagcactttgggaggctgaggtgggagggttgcttgagcccaggggtttgagaccagcttgggcaacaacaacaaaaatgccaggtgtggtggggtgcacctgtagtcccagctactagggaggctgagccaggaggatcacttgagcccgggaggttgaggctgcagtggggggtcataatcatgccactgtactccagcctgggtgacagagtgagaccctgtctccgaaaaaaaaaaaaaaaaaagaacggaaaaagaaatgcttacattgtcagggatcctgtagacaatcattaactctatgagatgcttggttctatttttttgggagactttgtccaagtgttttggcttaagaaatccataggcctctcttggtgacacatctctagtactttttgtcataaacaaacaggccatctgccgccaaatacatccactccccatgccactgacatcctatgggtcagccaggcttgctttgactgaggccgaggcatctggaactttctctgcctgcaggggctagcagcagaggcttcaccgcatcaccaccccttcctccactcctgacattctttcccttcagggatccaaaatggttggccgagctcccagtgggaaaacgtgtgctagagttggggagtgagatgagtggtgctgtccatggaatcaggccacagcaggaactgccccactggccatttgagacacacacaggtggtaaatgctctgctggtgggctgtgcttccctcattcagagagctctgttacagcccactgtgtcctttagaagcttgaaaggaacccaactctttgctgcactgtcctttttcttcctcaaattcagaccctccttccaccggcacccccctactccaccctcagctcttccttgcctggtttatcaagcagagctgaggccccacgtttccaactctgattgtcacttgcatcttcacaaaggataaaccacggagcaactggaaaaccatcagccaagcgttcggatgagtctggttattggtccacccccgaccagattcccttacacttaactcacttctttctttggcaatgaccctcatgacatgtataaatgggtatgactaagaagaggctgtgatctaacatttatttgctgccattttttactctggggagaagcagccccaactcatcactgggaaagaactccccctgcaaaccagctaaatttgataatttaaaccccctgcccctaaaacttctcacagagctggggagttggtggcaactttccaagtcaaggtcttgcttagaaagtccttcactacatggccaggtgcagtggctcacgcctgtagtcccaggtacttgggagcctgaggcaggaggattgcttgagctcaggagttcaaggctgcagagagctatgatcatcccactgcatttgtttaaaaataaatttttaaaatttgtgtgttttatcaggggtctcctgtacagtgtatctgtgtatgtttgtgtgtgtgtttgtatacagccttgtttaatgttttgagcaataagatatgcacacacaggtattttgttgctaaagagattggacaaggttgtagctgtgctcaggcttcagcttggtttgttaaattgagagataaacaatgacaagagctgccagccaaccacactattcaaaaagcaaagtgttcaccactaaagctaaccattcatctggttgcaggcaaggctaaggctctctctcctctagttcctggaacagactcacagattggcatgaagcactgatcaggggctgcactcagactccctggccaagcaaacctacaccagaagagtcagtgtcacagatatgatgcggccaatctctgtctccaaaaacctacctgaacttaatggtagaattcaaagatctggggactgagggcacccagccttctaaaacacaatgtattcatgtgtttagtgtaaactctctgcatggattctcagtgttaataataaaaggaagcattcttttacaactcctgctgtgtgcaaaagaaagtgcaaaggatttggagtggcattccgaagatcaccacacataccttggttctgatggctgctgaactccgacttcttcgctgagacatgactgtgggaacagcctccagctatctgctcatcagaggtgctttcctcaacctcctgcaccacctccaagagaaacagcctaaaaagaaaccccagctgtttacttatattggtctgtaaatccctggaagtaaaccccatgcatttttatctactgtctgaggacatacaataaatctgagaaagtctatgctgtcaaaaaaaaaaaaaaaaaaaa

SEQ ID NO: 7734 - DNA, 3469 bp, Homo sapiens
  misc_feature (3202)..(3202): n is a, c, g, or t
gaagacgtgcggagggagacgcagagacagaggagaggccggcagccacccagtctcgggggagcacttagctcccccgccccggctcccaccctgtccggggggctcctgaagccctcagccccaaccccgggctccccatggaagccagctgtgccccaggaggagcaggaggaggtggagtcggctgaatgcccacggtgcgcccggggcccctgagcccatcccgctcctagccgctgccctaaggcccccgcgcgccccgcgccccccacccggggccgcgccgcctccgtccgcccctcccccggggcttcgccccggacctgccccccgcccgtttgccagcgctcaggcaggagctctggactgggcgcgccgccgccctggagtgagggaagcccagtggaagggggtcccgggagccggctgcgatggacgccgtcttggaacccttcccggccgacaggctgttccccggatccagcttcctggacttgggggatctgaacgagtcggacttcctcaacaatgcgcactttcctgagcacctggaccactttacggagaacatggaggacttctccaatgacctgttcagcagcttctttgatgaccctgtgctggatgagaagagccctctattggacatggaactggactcccctacgccaggcatccaggcggagcacagctactccctgagcggcgactcagcgccccagagcccccttgtgcccatcaagatggaggacaccacccaagatgcagagcatggagcatgggcgctgggacacaaactgtgctccatcatggtgaagcaggagcagagcccggagctgcccgtggaccctctggctgccccctcggccatggctgccgcggccgccatggccaccaccccgctgctgggcctcagccccttgtccaggctgcccatcccccaccaggccccgggagagatgactcagctgccagtgatcaaagcagagcctctggaggtgaaccagttcctcaaagtgacaccggaggacctggtgcagatgcctccgacgccccccagcagccatggcagtgacagcgacggctcccagagtccccgctctctgcccccctccagccctgtcaggcccatggcgcgctcctccacggccatctccacctccccactcctcactgcccctcacaaattacaggggacatcagggccactgctcctgacagaggaggagaagcggaccctgattgctgagggctaccccatccccacaaaactccccctcaccaaagccgaggagaaggccttgaagagagtccggaggaaaatcaagaacaagatctcagcccaggagagccgtcgtaagaagaaggagtatgtggagtgtctagaaaagaaggtggagacatttacatctgagaacaatgaactgtggaagaaggtggagaccctggagaatgccaacaggaccctgctccagcagctgcagaaactccagactctggtcaccaacaagatctccagaccttacaagatggccgccacccagactgggacctgcctcatggtggcagccttgtgctttgttctggtgctgggctccctcgtgccctgccttcccgagttctcctccggctcccagactgtgaaggaagaccccctggccgcagacggcgtctacacggccagccagatgccctcccgaagcctcctattctacgatgacggggcaggcttatgggaagatggccgcagcaccctgctgcccatggagcccccagatggctgggaaatcaaccccggggggccggcagagcagcggccccgggaccacctgcagcatgatcacctggacagcacccacgagaccaccaagtacctgagtgaggcctggcctaaagacggtggaaacggcaccagccccgacttctcccactccaaggagtggttccacgacagggatctgggccccaacaccaccatcaaactctcctaggccatgccaagacccaggacataggacggacccctggtacccagaagaggagttcttgctcactaacccggatccgcctcgtgcccctgcctcctggagcttcccattccaggagaaaaggctccacttcccagcccttccttgcccctgacatttggactcttcccttgggccgaccactctgttctcattctccttcccaccaacatccatccgtccttctcagacaaaccactcactgggtaccccacctcctctctcatatgcccaacacgaccactgcctccctgcccccacacctgcacccaaacagacacatcaacgcaccccactcacagacaccccttaccccacccccactgtacagagaccaagaacagaaattgtttgtaaataatgaaccttattttttattattgccaatcccctaagatattgtattttacaaatctccctcttcccttcgcccctcccttgttttatattttatgaagttagtgcgggctttgctgctccctggcccaggaaagagggactacctgaccctcacctggcacccccctgctgctgcccaagccgctgggcctttttaattgccaaactgctctcttcatcagctcagcacatgctttaagaaagcaaaaccaaaaaaaaaaaaaaaaagatgcagcatcaaaaaaaaaaaaaaaaaaaaaaaaaaaaaaaaaaaaaaaaaaaaaaaaaaaaaaaaaaaaaaaaaaaaaaaaaaaaaaaaaaaaaaaaaaaaaaaaaaaaaaaaaaaaaaaaaaaaaaaaaacacacaccaaaaacaacccaaaaaaccaaaaacgggggggggcgcctaaaaaaaccccccgggggggccacattctcccagcccctctttttttggaaaaaagggccccccaagggggcgccctaaaaaaaacaggcggggcgccccttttccccccccggggagggaaaaaacccgcaccggggaaccctccgggaaaaaaaaacctttctctgggggggggcgcgcacggtggggaccccccccccccaaaacattctccccccctctggagaaaaaaaaaacaaaatcttcaccagggaaaacaagggggggggagaaaaaccccgtacctatttgcccgcggggcgcccagagaaaaattcccccgttccgggggccgggacgtgttccctgaagaaaacttcatcanccgccccgggcgcccgcgcggggggcgtcttaaagtgtgggggcggtttcctccaaaaaacaaccgaacgccaaaccggggctctttttggggggccgccccaacactccccaaaagagggggagccccgggacgcatataaccacggtccgcacaccattttttgggaaaagggcgttttttttggttgctaaaaaaaaaaactcccccaaactttccccctcggcgagagggggggaaaaagataaaaagaaaagcccgcatggg

SEQ ID NO: 7735 - DNA, 945 bp, Homo sapiens
tctagataagaagatatgcaccacgttgaaaatactcagtgtagatctctatgtgtataggtatctgtatatctttccttttgtttacaactgttaaaaaacctcaaaatattctcttcaaaagaagagagattccaagcaacccatctttcttcagtatgtatgttctgtacatacttatcggagcgcgccagtaagtatcaggcatatatatctgtctgttagcaatgattattacatcatcagatcagcatgtgctatactccctgcaagaaatatactgacatgaacaggccagttcttggagaagaaagagcatttctttaagtacctggggaatacagctctcagtgatcagcagggagtttatttgaggacatcagtcacctttggggttgccatgtacaatgagatttataatcatgatactcttcggtggtagtttcaaaagacactactaatacagggaagcgttcccagcctatttaatgctggcaactactgtttaatggtcagttaaatctgtgataatggttggaagtgggtggggttatgaaattgtagatgtttttagaaaaacttgtgaatgaaaatgaatccaagtgtttcatgtgaagatgttgagccattgctatcatgcattcctgtctcatggcagaaaattttgaagattaaaaaataaaataatcaaaatgtttcctctttctaaaaaaaaaaaaaaaagagcgctaagtatcctgaagggaccagtaagcgtacagttctgtccaagggccttagggagtgtaaaaacgcagaagcgcattacagcggccgcaacgctgcgaacttgggaggactacttcgggggcatgcacctcaaatagccagggaacaggttggcacccacggaagtgatcataaaagaaaacaaacagaaaaaaaagaataaacaaaacacccacg

SEQ ID NO: 7736 - DNA, 2991 bp, Homo sapiens
  misc_feature (1461)..(1492): n is a, c, g, or t
gtagcctatagggaagggcgttggaaggatcacccagaactcaagggacctggccggaagcctgcaggcttggtcaaggcttagagacttgactgaggcctgtggaggtggatgtggctaaaatttgaccgggcagcctgtgggcgtggctgaagagcatgggggtgtggtcagagctggaggtgtggccgaagagtgtgggggcgtggccagggcgcctggtcttagacaagcccctggatgggagtgccaccaacatgtttccagcactggagccgtccttctcttctgtaagtgggctggtttgtcctctcccttcctccatctcttttttcccttccatgtgcagtgccctaatctgcattctgggaacactgccccatgtgaatagtaactgcacccctccattcctgactgcccccccatcagggcacctcgcccacctccacccccactgtcctctgaactcagagcagcttcagcctcagagaacgtctgcgtgatcctgctctccccagctccagatcctccatggctccctcacgccctttggaaaaactcactcttctcccccatgaccgccagacccctgggctcctgcattcactccatccagtcacagagctctgcaaacatgctgagcctgctcccatcccaggacctgacggggtaactagatccctggctttctgggcaagctccctccggagggcgggaggagagtgacaggcccgatcttgcaccccagctatgtgggccggaagcggatgcaggtggagcaccccgagaaggctgtgcctcgcgtgaggaacctggtggaggccgactattcctactggaccctggcctacgtgatctccctgcaaggcgcccgcaaactgctggctgctgagccgctctccaagatgctgcctgtggacgagttcctgcccgtcatgttcgacaaacacccagtgtccgagtacaaggcccacttctccctccgcaacctgcatgccttctctgtggagccgctgctcatctaccccacacactacacaggagacgatggctatgtgagtgacaccgagacctcagtcgtatggaacaatgagcacgtcaagaccgactgggaccgcgccaagtcccagaagatgcgggagcagcaggcactgagccgtgaggccaagaactcggacgtgctccagtccccactggacagtgctgcccgggatgaactctgaggggtagcagccagaaagccaaagcagccatcggtggcccaggctccacgtgcttactgaggacatcagggccacctctggaccccttggcaggccacagagggctctcgtgtggggtggtgtccagccagctcttgctaagcaatcacgtgcacacaggcagcattaatggagtgcctactgcatgccagcaacagggcttggccctggggaattgggaggaaccaagccctcttcnnnnnnnnnnnnnnnnnnnnnnnnnnnnnnnnctgctgtatgcaaggttcccatgttacggcagtgaatgaggcataattgttccctccatcagcgattgattcagtcatcaagcagttactgatcagattaagaatcaggcactagtgatacacattcatttttaaaattcattcaaggatttattgagtgcctactgtgtgttgggtgccattccaggctctgggatttttttttttttttttttaagagtagagtctgtctctgtcacccaggctggagtgcagtggtgtgacggctcactgcagcctgcgcctcccagcgtccagcaattcttgtttctcggcctcccaagtagctgggactataggtgcgtgccatcacatctggctagtttttgtatttttagtagagacggggtttcaccatgttggccagactggtctcgaactcctgacctcaagtgatctgcccgccttggccacccaaagtgctagggttacaggcatgagccactgtgcccagcccaggctctgggaatattgagataaataagatgcttctatccatttattcaagcacatattggtcacctactgtgtgcctggcactcatgtcacaaagataagttcctgattcgatacacttactgagcacctgctgtgtgcagggagctgagctatgggatgggaatgggagtaaacaaggtacttttcactttttttctttttttcctcactgctagacggtgtgggaacttctcactcattggcttctttcccacacacctgaagagcactgactgtgtgccgggcactagtgatacaaaagagtgtgacagttgttcagtctgcattttcgatcatgggctacatgccgagtgctggggcacagagatgaacaagatcggttccttcacttcttcatgccacaagtgtttattgagcacctgtgtgccaggcctcacagactcccagttgggttgaagaatggttgactgagtttgattcttcctgtaccctcggtcgtctgagctgtgtgcagacaacatccccccaccacccaagagggagggtagctcttccgccaccaggggcaagcacaggtcctggtggccccacgccacatgttagcccccctggagggggcgccagttggagacgggggctgggtgtccctggcccactcccggtcccctgtgctttacctccttgcccttgtgtctcaggtgtggtccctgcctgcttgatgaagttgctctgttcaagcctttggtgggatcatgtgtttgggggcttttaggggacccagctgcactggggcactgcccgtggcctgggtaggacatttcccagcaagggctggaggagttgccgtgccttcagcctgaatcgaatgtcagaaccagccagcggtgcttcaccctcttggggataacttgcttagttttttaataaatgttcctggttggttttcacagcaaaaaaaagaaaaaaaaaaaaaaaaaaaaaaaaaaaaaaaaagaacaaaa

SEQ ID NO: 7737 - DNA, 3194 bp, Homo sapiens
  misc_feature (8)..(61): n is a, c, g, or t
  misc_feature (2834)..(2851): n is a, c, g, or t
tcaatcgnnnnnnnnnnnnnnnnnnnnnnnnnnnnnnnnnnnnnnnnnnnnnnnnnnnnnntttttttttttttttttttagagaactagtttttttttttttttttttttgcgagacaaagtcctttattagaaaatatatcaaaatcccagccccctgagccaggaccagaagagggagctattccagcataggcagaaaatgcccagggaggggcttccttcaccaaacaacttcccgggaaccataaatagaataaatattcacagaggtccgaggagaagccagatcactcttctctccatggaagagggaggggcttggggtccagccctgctcctactctaggggcagggactcctaggaatcgtcacataaaatcatgacatcaaggattcacagtcataagccctacaggagaccctagagagagggacccctcaggtctacaggagcccagctccagtccagcagtgagggagaggcccctaccccctagcacggcaccagagttcagttccctcacatccctctgagaacagtgaggagctgagggtggggagaatacaaccccatgaattcggtttcatgattaaggtagacaggaaggaggagtcagtgtgaacctcggagggctgtgtggttggcagtagatagaggcccaggcctggctgggggccggcgttgcagcatctcttgacggaaggcttgggaggaaccaggtgggtaacgtggcccagaaggagcccgaggaccccgagggtcagtcccaatgtctgctgtgatgttggtataaagaggccccagctctcgagccagcaactggtatgtcagtgagttcatcccatcttgcgtccaggaattctgggtacggaccaggaggtcaaaactgtggggattttcctcattgcccttatctcctcggtgcttcaccatcttatagtgtcctacagatgtggggggccgagagatcttcatcccagccaggcgcaccctggtagcaatgtcgtcatcctcaccaccccagccccagtattcattggggaagccattcatcttcaggtactggtcaggagtaagtgctgagactcctccgaagtactgggggtacgggaggctagggagagaaagatccttgcataccccgagtcttctggggacacatccccaaccacaatccgcttggctctcctccttccacaggatagtaggcttccctgtttcccagtacccttccatgccctctacctgtatccaaacttgttcatagcaacggcaacatggcggggtccccgggggtcacacacatacagattgtggtcattttctggcaagaggtccacatcgtgcaagaacaggcagtcccactcttcatcacgcagggcctctcgcaccccaacgttcaacagttttgccctgttaaatgttccatttccagcctggtggatgacatagatgccataagcaagctgctggcgctgcaagaaggggtgcaggtggtagagcagcaggcgcaggtggtgctcccgggcacgatgaggcacaatgatggctgttcgggagcggggctcacaacctgcagggcggtaccggccccctggttctacccggggattccgctccacaatctctgccagtgatggcactgggctaaaggacaccgacacaggacccactaagagaggagatcgttctggacagtagggcagaccttgaggagctggaggaccccctggggccccaggcaggtgactgaggttactgtagacatcacgagggtgagaatagtcaaatgtcggtccctgatctcggccaaatagggcactgagacttcggaagccccccagtgacaggtacatcatgacagccagctgggagcccacaagcagggccagcgtgcaaggccgctccagcagcctccgcaacatcctgggggtgagatctagggagggagaggggaattctgggggtaggcaggaagagagcaagccagcagagaggtcagtaggtagggttgaaggtgatgccaggggtaaagaggaaaaagcagaaaacaaagtcacagaagggagcacacaggtgcacagtcacgcaaggaaacagaatgtaaccaccagtaaccctaccacctgtcacttcagcccaagtttcgctctcctctacctccccccaaaccactcccaccatctactgtcagtcctcacccccaaaaatgtttacatcattcaaatctcatgttcatttcagaaagtctctagagaaccccctcttccaattttagaagggaagagatagactcacctaggttcaagctgtcttcttagggatcatgggggctccagggggtcccggggggacagagatgtgaggcattatctaaaattggaaatgtcacagagggcagagaaaggctccatccagcactccagcagcgaatctgggaccagctggaacagaagtggtaaaggataactagctacctgcaccgccagagatcaggatcagggtgaagctggtttcccagcaggcgaagtgaaggaaagtggttggaaaggaagaggaggagcaggagatggtaggtccctcgcctatctcccgtgctaccctggaatgataagtgtcaggttcatacttaaccacccccgtacccccaccccaacaggacagattggggagtggggacaggacagctaatggaaacattgttttcccccagaccaagaaccagttgaagtggcgacagagtcatgacaggaccgtggagtggcctaaggagtacccagggcgaagtaggaaacaggctccttctattcttcatgtgcctgggtgccannnnnnnnnnnnnnnnnngaccgtgaccgcctgggggctgtaagcgaacagccccggagctcggcggagagtagggtgggggtggcgtcctctaccttttctacctttcccctcttctagcgggggtggggaggagggttactgctgaagagaaagggagagggagagcaggggcagagacagtctcttgcttttgccctacctactagcaacgtgagcccgcccggcccccgtccatacttccacctaggaccccgtccctgctcaggctcgtctccaggcgttacccaaaacttctcactctctcgaatgcccaaacctttatcccaggcctccgtgtcgacgcattcccagcgcacat

SEQ ID NO: 7738 - DNA, 2939 bp, Homo sapiens
  misc_feature (350)..(371): n is a, c, g, or t
  misc_feature (1705)..(1728): n is a, c, g, or t
gttctatagtcctattaatcagtctttagtgagcctatgtcctgggctgtgaaacttagttccctccccccattatgtggggcagaatggctagaggggactggagttgagttaggctctgataaaaccccaatcgtttaggctttggtgaaacagtttctcttgaagacaggcctcgttaagaacagaatgctctggcatgtttcaaaatggctacgttccccgcctcccgctgcaagaatgaggggagtttttctgatattccctgtgagaacctggttagagctcctagaggtaaaactcacagaagtgtagagagtttctaactctcagacttgtccaccctgagnnnnnnnnnnnnnnnnnnnnnnagttcagggtttcccatgcaagcaatggttcctgtggtttctgctctgtttctgtcacccaggctggagtacagtggcacgatcacagctcactgcaccctcaacttcccaggctcaggtgattctcctgcatcagcctcccgagtagctgggactacaggtgtggacacattgagaagtcactatctatgaactaggaagcaggatctcaccagacatcgaatctgctgatgcctgcagcccactcttcccgagaggccccgacatctcccggataatctggagctttcaaaatgtttgccaaagcaaccaggaattttcttagagaagttgatgctgatggtgacctgattgcagtatcaaatctgaatgactctgataagttacagcttctaagtctggtgacaaaaaagaagacgattctggtgctgggagagacccaagtaccagtttttatccctcacccttggcgatgtactcatagaagaccaatttccgagtccagtggtcgtggagtcggactttgtgaaatacgagggcaagtttgcaaaccacgtgagtggaaccctggagactgcactggggaaggtcaagctgaacctggggggcagcagccgcgtagagagccagtcttcatttggaaccctgaggaagcaggaggtggatttgcagcagctcatcagagactctgccgagagaacaataaatctgagaaaccctgtctccagactaggtgctggaggaaggaatgaggtcctgtgcgttttgacacagaagatcacgacgatgcagaagtgtgtgatctctgagcacatgcaggtcgaggagaagtgtggtggcatcgtgggcatccagaccaagacggtgcaggtgtcagcgacggaggatgggaatgtcaccaaggactccaacgtggtgctggagatcccagctgccaccaccattgcctacggtgtcattgagttatacgtgaaactggacggccagttcgagttctgccttctccgagggaagcaaggtggcttcgagaacaagaagagaattgactctgtctacctggaccccctggtctttcgagagtttgcattcatagacatgccagatgctgcgcatgggatatcttcccaggatggaccattaagtgttttaaagcaagcgaccctgctcctggagaggaatttccatccatttgcggagctgcctgagccacaacagacagctttgagtgacatcttccaggcggtcctatttgatgatgaactactcatggtcctggaaccagtgtgcgatgacctggtcagcggcctctcgcccacagtggcggtgctgggggnnnnnnnnnnnnnnnnnnnnnnnnggaccttgtggccttcctgcagctggtggggtgcagcttacagggtgggtgtccgggccccgaggatgcaggcagcaagcagctgtttatgacagcctacttcttggtcagtgccctcgcagaaatgccagatagcgcagcagctctgctgggcacttgctgcaaactccagatcattcccacactgtgccacttgcttcgtgctctgtctgatgatggagtatctgatcttgaagacccaaccttgactcccctgaaagatacagaaaggtttgggattgtgcagcgcttgtttgcctcagctgacattagtctggagagactgaagtcatctgtgaaagctgtcattctgaaggactctaaagtcttcccactgcttctttgtataaccctgaatggactctgtgctttaggcagagaacattcatgatgtcatatgtgaactagaagtacgtgttactggccaaggctatttttcagaactgttaaaggtcatatgcacgttaaaagttgaccaatgaaatgaatttacagaacagtttaagaagtggtgacattttgcatgatgaatgacctgacttttagccaccaggtactctttaaacagttttccttatcagaggccctcctgtgctggtgacccagcatctgagttaggttccagcatgtaaagagctgggagggcggagaattcttagcatacattcagacgttttttctgcacaataataagtccatctgtcacttgcattccactttttgttacatagaaagagtctgaccctttaatccaaaaggtctttttacattgtgaatgctgtgggaaggcaatttctctgcacacaagaggctacgttttggaagtgatgtatgttatttgatgactgaaaatgaactgtaaatgctcctagagtatattcctctgctgaacaaaattaaacttcaaaaaaatctaacagtaacacacccctgcttgggaccctagctatatgcattttatgtgaccttgccatgcttcagtgaacatactaattctatgtctagcacatgttgatttcctatgtattctgggtattctattaaaggaaactttgaactatgaaaaaaaaaaaaaaaaaaatgaccaaacaaaaaccacaaaaaaaagggggggggcgccaaaaaatcccccggggggcccattgccccccgttttttaaaaaggggcccca

SEQ ID NO: 7739 - DNA, 6833 bp, Homo sapiens; identical to SEQ ID NO: 6965
  misc_feature (1328)..(1342): n is a, c, g, or t
  misc_feature (1957)..(1993): n is a, c, g, or t

SEQ ID NO: 7740 - DNA, 2684 bp, Homo sapiens
gcatagaatctgtaggagatagagcgaggagagggagatgaggaccaaaggcgtctttttctggtgtggaactgggatgtgcggcgatacggcagccatcttagaggcaacgtggggttcccagcacaggacgcgccgggaagcagtagtggaaagcactgggtcgttctcaggagcagtgggaccttctggcgtgtggctcgcaccactgaatatcggtgtactccggaaaagggggagtcatctaggcaaaaatgtcactttgcctgtctgctattcaatggctcctattgcgaccagcatattgctgaagctttgttcaaccaaccgaacttgtggcgcaaaaaacaacagacagcccctatgctgtcacgtgaattaggcaggtcatcagacctagttgcttgagtcttgcgggtacctggcagagctgtggctctgaattcccagagcttcgaggctggatgggactcacacgcctctgcgccaagggtgcttataggaaacatgtgtcagtgggaggcccgaatgttttgcaccaagacaaaaacctggcgccgttgggcattcgtaggagtgaacacaacccaaaaacgatacgccatctgttctgcgcctggcctgcctcaggccctaccagcactggtcaatgtctaagaggtcatcgtattagaggaagttccttgaacttccttgtggtagtttgaagatacacagttgaaggctacaagaagaccaaggaaagctgtttttgctcccttaagaaagcttaaagcctgggaatgatatcaaacaaggtgctattgcctctcaagccgaatgaagaggctggccaaaggcaaaatgaggaaaacggttcgccggtatccaggcgcagggggccccgtgccatccatctattatgaggattactggtatccatcaaggcccttcagaaaacattccctggaatttactctgctttaatgttaagccaagcttgaacatttttgaagcttggctccctgggtgggcatgtggggacgttctgcatttgggactgaaagtgctttccggcaaggttagatgaattgtacgggcacttgcgcgtaaaagccgcttccgctcaagagtaactacaatcttcccatggcacaagattgattaatacagatcttagcagaatcttgaaaaagcccagcagatccaaagagccctttcgaggcaccacgcaagaagatcgcatcgcagagctcctaaagaagaaccccactgaaaaacttgagaatcatgttgaagctaaacccatatgcaaagaccatgcgccggaacaccattacttcgcccaggcccaggaatcacaagcctccgcggtggataaggcagctcgctgccaggcagcgggcacctacaaggccaaatcagatgagaaggcggctggttgccaggccaagaagcctgtggtaggtaagaacaggaaagaaggctgctgcttggtgttaagaagcagaagaagcctctggtggggaaaaaaggcagcagctacctaagaaacttaaagcctggcaatgatatcaaaaaggtctatgcctctcagcgaatgagagctggcaaaggcaaaatgagaaaccgtcgccgtatccagcgcaggggcccgtgcatcatctataatgaggataatggtatcatcaaggccttcagaaacatccctggaattactctgcttaatgtaagcaagctgaacattttgaagcttgctcctggtgggcatgtgggacgtttctgcatttggactgaaagtgctttccggaagttagatgaattgtacggcacttggcgtaaagccgcttccctcaagagtaactacaatcttcccatgcacaagatgattaaatacagatcttaggcagaatcttgaaaaggcccagagatccaaagagcccttccgagcagccacggcaaggaagatgccatcgcagagtcctaaaagaagaacccactggaaaaactttgagaatcatgttgaaagcttaaacccatatggcaaagaccatgcgccggaacaccattcttcgccaggccaggaatcacaagctccgggtggataaggcaggctgctgcagcagcgggcactacaagccaaatcagatgagaaggcggcggttgcaggccaagaagcctgtggtaggtaagaaaggaaagaaggctgctgttggtgttaagaagcagaagaagcctctggtgggaaaaaaaggcagcagctaccaagaaaccagcccctgaaaagaagcctgcagagaagaaacctactacagaggagaagaagcctgctgcataaactcttaaatttgattattccataaaggtcaaatcattttggacagcttcttttgaataaagacctgattatacaggcagtgagaaaaaaaacaaagcactaaacaacgaaacaaacgaacgacacaaccaaaacaaacaacaaacaactagacaaaaaaagcgagggcgcgggcgccgcaaaaaatcaccctcagcgggggcccgacgacagcaatcacacccccggttcgtgagaaagcgggcccccccaaagaggggcgcctaacaaacgccagaccgggcggcggtaaaacaccacgccgtcaacggaaaactggcacacgggcatctgcgagagacaccccgcgcggcgggaacataggcac

SEQ ID NO: 7741 - DNA, 3118 bp, Homo sapiens
  misc_feature (453)..(473): n is a, c, g, or t
cactgtatgctgtgtggacatgcatttcatgtggctgtgtggtaagaattacagcttacatatggcttggacccacatccgaggaatctgatgttcacttataccagaacattatcttgctatttatgaaattatttaaacgttcaaaagattgtttttaacatggtttaatttcccaaaaactacagttttttttcttagcatgctattcaggtaaacagtcttataataaagcatgtcccattgtcaagaaacataaagtggtgtgaataccactgaaaatatatatatagtatcttctgtaaataatagtacctgtgtgaataaggaataggcttgcctcccagccaggcaatttcctgagggcacactaatgatatcccctgagttgctaagttgatgctgagacattttgctgggaattagtcatggcatgatctctttcagactccnnnnnnnnnnnnnnnnnnnnnaacagtgctcacaactcatgtgctaatgaatcacaaaggctttaactagctcccaggttgtagccttcgcaggatctagtttatttgccacatctctttatgaacatatagcgattcgcagatctctctattcacggagaggaaggtgttttgcttctgtagatctcaaggtactattttgtggctctcagcaggaagtagaattgttcctaaatgtgtgctgaatgaggacatgatgtccctcctggtgccaggacacatcctgcatggcattctgtgaagggcatacctgctgaggataatgccaggagcagcacatttagggtaattttgctaaaacttccagatgacatataaattccctctttttccccctgaaacttaccatttcagaggtaatggctttttctgtaatttgcctgagaagaaaaaagggataatttagaaataacactccaagcctatatattactagggctgcatcctctggaatttaatagaaaaattgaatatatagccctatgtaactacagacatcattacaactgttaagttctgttcaccatgcaagttctcggtggtgtatgtactctcaccttttggaaacaaaaccttgcattgaaggttttacacatggcttcagaatgttactctgaccatgtttgcctctactccagattatcatggcacctaacacagatgacatatggcagaatggaagtgatttctcctaatgaaaatgaagtgctcttttgagtatttcttgttttattgagattcctatctgcccttgtacttttataactgaatgtaaataggaattgcttaaatactggtttacactaatcccatagttaaaaatcttggctatggtacaggaaggatatctatatagaggatagttccagaaacaagccctggtgaaataggaaatataaaaacttctttatggaacaggaaaacccaagagactttctcgtcagattcctttccagtgcaaagtataacagagataggattatgagatgaaatcacagtagtgtgtttcctttaattttttctgtcttctttttttttttttttttttgagacggagtctcgctctgttgcccaggctggagtgcggtagcacagtcttggctcactgcaacctccacctcctgggttcaagcgattctcctgcctctgcctcctaagtagctgggattacaggcgtgcaccgccaagcccggctaatttttgtatttttagtagagacggggtttcaccatgttatgcaggctggtctcaaactcctgacctcagaatattcacctgcctcggcctcccaaagtgctgggattacagatgtgaatggccacgcctggcctgtttcctttaagttagcacttcacgtgctcttacagcgttaattgccattattggtttgcctgattttcctgcatctcctcatatgtaagtctgcagcccaaggagagaatagtagctgtatgtgcccacaaggggtgtccaagcttcttgattcttgttaatatcgactccccaacattgaaaaaggagtgaagaagggaatatcattttagggtactgctttaaaggaatgataaagtaaacaacgtagcagggaaaataccacttgcacaaatgtatttctttgtcaaagtgtgtacacgctttctgtttgtcctgatgtcctgctgtgaagcagggaccacattgccatttattcattgttccaggcaatgcatttgtccaaacccctctggctctctgatatctctcatttcttgatgttcctattctctgacctcaacaaggaggacactgtctgttgtgtctctttgagactagaactccatgtgtttaaccttcagatccattctctacatgaaccctattctttccaccctggtaagaaggtctggaagacaggtcctaacgaggggtcagagaaggcacagagaaatgaaccagccatgcaggggcagcactgaggaggaaaccccccactctaactgggaggagagtggaaacactcttagtatctcagagtagttaccaatctaagagcatccttcgagtttaagtcaaaactctaggcttaataccaaaaataatacatcatttggaaaaatagcttggagaaaaaaaatcaataaagagtcacataaaatcttaagaaaatggttctattctgtgatatattactaagaaatacagttcttaaacgtgtataactattgtcagacaatttataggtgtttcatctagtcctgggatgaaatacgatgactcatgcaaattcagggagcacactggctgactttaaattggaacattgtaaagtgaaagctgtgaaaggttgtgtgtcctatcaatgagatttattttctaaccaagagctgttcggatgattcagtataaatacgaaaatcacatccaaaaacggtataacccagcttccttaaggcaattttcttctctgaaacaagaatatactcatatgttctttactataatgtatatgatttttatcttgtactttaaaagatgataattatgcattgtatatacgattgtgtgccttgcaataaaatcaaaactgtacctgctgaaaatcacaacagtcaaaaaaaaaaaaaaaa

SEQ ID NO: 7742 - DNA, 1690 bp, Homo sapiens
  misc_feature (161)..(161): n is a, c, g, or t
gcaggtcgcagctgtggctcgggtgctggcaggtgctggcgggactggcggggatcgccgtggactgcctcaggggcgccgcagcccgctcggcccgagggcccgcctaaccgcgccgcccgcgcccgctcctcctcggcccgcgcccggagcgcgggcgngccgccggcgctgggtactcggcggccaccggggatcggggctgagcggtcggttcccgcccccgtgccgccgccgccgccttccggccgaccgcccggcttggccgctgctgccgcgtctggcccccgggtccccgccgctgggggcgcgggcggggtcgggggttgccgggcgccgccccccgtgcgcctggagtccacatcccgggcccggcggccggcgaacatggaggagaagtacctgcccgagctgatggcggagaaggactccctggacccctccttcacgcacgccctgcgcctggtgaaccaagaaatagaaaagtttcaaaaaggagaaggcaaggatgaagaaaagtacatcgatgtggtgattaataagaacatgaagctgggacagaaagtgttaattcccgtaaaacagttccctaagttcaactttgtggggaaacttttgggtccacgtggcaattctctgaagcgtttacaagaagaaaccttgacaaaaatgtccatccttgggaaaggttccatgagagacaaggccaaggaagaagagttgaggaaaagtggagaagcgaagtacttccatctcaatgatgatctccatgttctcattgaagtgtttgccccacctgcagaagcttatgccaggatgggacatgctttggaagaaatcaaaaagttcctcatccctgattataatgatgagatcaggcaagcacagctccaggagttaacatatttgaatggtggttcagaaaatgcagatgttccagtggttcgagggaaacccaccttgcgtacaagaggtgtaccagccccagcaataaccaggggaaggggaggagttacagcccggccagttggagttgtagtaccacgagggacgccaactcccagaggagtcctgtccacccgagggccagtgagtcggggaagaggacttctcactcccagagcaagaggagtccccccaactgggtacagacctccaccgccacccccgacacaagagacttatggagaatattggtgctgattactatgattacggacatggactcagtgaggagacttatgattcctacgggcaagaagagtggactaactcaagacacaaggcaccttcagcgaggacagcaaagggcgtctacagagaccagccatatggcagatactgattgtactgtctgatgttgtgaaatagccaatctccaccagtcctgtatactgttcaaagtaatttttttctatgaacaatccctttttaaataaatcaaaatgcttaaaatctgaatggatggaacttaaaactactttgttgaaacatcaacctgggcagaaaaaaaaaaaaaaaaaaacatgtaaaattgtgttatttccagtctgtatatgaaaaaaatagggtcatccaaagggacaccgaaataaccttgtgatacactacggtgttagcacaagataggtctactacatatgttaatctatctattaccataagcctcacttaatttacaaggttcatt

SEQ ID NO: 7743 - DNA, 700 bp, Homo sapiens
ttgagtcacagtgtgctgtcacagaccagcttcagggccgagtacaaggccagtggcggcccctccgtcttccaaaagcccgtccgcttccaggtggacatcagctcctctgagggtccagagccctccccgcgacgggacggcagcggaggtggtggcatctactccgtcaccttcactctcatctcgggtcccagccgtcggttcaagcgagtggtggagaccatccaggcacagctcctgagcactcatgaccagccctccgtgcaggccctggcagacgagaagaacggggcccagacccggcctgctggtgccccaccccgaagcctgcagcccccacccggccgcccagacccagagctgtttctattttatttattgattaatttattattttatttattgatcaatctctctgcggggtggggtgggggagggacgggagctggttggggtggctatagcagatccggacagggccctctgtccctgtgtcgtccccaaccccctcttcccgggcccctcctcccctggtcctccccccacgaccttctgtacggatttgctctccggaaggaattctggtttcgcgtgatcctgcctgcgtccgtgtctctgattccgccggcggcaaaaaaaaaaaaaaaaaaaaaaaaaaaaaagatgataataataaatagccttgcatcagggaaaa

SEQ ID NO: 7744 - DNA, 2255 bp, Homo sapiens
  misc_feature (1072)..(1155): n is a, c, g, or t
ggcggtcagactggcagagcggctttgctctgggcgtttcgttcgtctctgggccgcttcctcttccccacagcctgcggcgacgcagcggctacaccgtgcaggtgaacgtgcagacgagctcactcgtggatatgttagctgcccgcactacaacagctcgggggtgggccccggggcggcgaccgcgcggcccggaggcggggcagacgcagtacgctgctgtacgatggtgagccgcaacggctaccgcacctgcaacgccagccagggcttcaagcgctgggagtgcaaccggccgcacgccccgcacagccccatgcaagttctcggagaagttccagcgctacagcgcgcgttctctctgggctacgagttccacgccggccacgagtactactacatctccacgcccactcacaacctgcactggaagtgtctgaggatgaaggtgttcgtctgctgcgcctccacatcgcactccgggcgagaagccggtccccactctcccccagttcaccatgggccccaatgtgaagatcaacgtgctggaagactttgagggagggaaccctcaggtgcccaagcttgagaagagcatgcaggcgggaccagccccaaacgggaacacctgcccctggccgtgggcatcgccttcttcctcatgacgttcttggcctcctagctctgccccctcccctgggggggggagagatggggcggggcttggaaggagcagggagcctttggcctctccaagggaagcctagtgggcctagacccctcctcccatggctagaagtggggcctgcaccatacatctgtgtccgcccctctaccccttccccccacgtagggcactgtagtggaccaagcacggggacagccatgggtcccgggcggcttgtggctctggtaatgtttggtaccaaacttgggggccaaaaagggcagtgctcaggactccctggcccctggtacctttccctgactcctggtgccctctccctttgtccccccagagagacatatgcccccagagagagcaaatcgaagcgtgggaggcaccccnnnnnnnnnnnnnnnnnnnnnnnnnnnnnnnnnnnnnnnnnnnnnnnnnnnnnnnnnnnnnnnnnnnnnnnnnnnnnnnnnnnnacagcaataagcacgtcctcctcccccactcccacttccaggattgtggtttggattgaaaccaagtttacaagtagacacccctgggggggcgggcagtggacaaggatggcaaggggtgggcattggggtgccaggcaggcatgtacagactctatatctctatatataatgtacagacagacagagtcccttccctctttaaccccctgacctttcttgacttccccttcagcttcagaccccttccccaccaggctaggccccccacacttgggggaccccctggcccctcttttgtcttctgtgaagacaggacctatgcaacgcacagacacttttggagaccgtaaaacaacaacgccccctcccttccagccctgagccgggaaccatctcccaggaccttgccctgctcaccctatgtggtcccacctatcctcctgggcctttttcaagtgctttggctgtgactttcatactctgctcttagtctaaaaaaaataaactggagataaaaataaaaaaaaaaaaaaaaaaaaaaaaaaaaaaaaaaaaaaaaaaaaaaaaaaaaaaaaaagaaacaaacaccacaaaacaacaaagaaaaaaaaaacaacaggggcggcgccgcgcgcggcaacaagacccccacgggggggcggccgcaatagcaccgccgccgccccgcttttgacggagggaggcgcacccacagagaagcgcgaccaacatataacaacaaccgaacacgacggggcccgaccaccaaacagcacacggaacacagcagggaggaacacaacgacgacagcaccagagcagcacaccacgacgcgcacaacgaccaccaccacacacgaacgcgggccgagcgcacacaacacgtggggcaaacaaccccgcccaagacggcggaacgacccgcccccgccagtcgaggccacccagccaccgcaccagataacagagcggcgacaacacggacgcaggcaccaccacacctaccgcccaaaagcagacgccagagaggacacgagagaaattgagagacaacacaggagggcccatactgcccagccaacatctacaacaggaca

SEQ ID NO: 7745 - DNA, 2140 bp, Homo sapiens
ggcacgaagatcagctgatgccggagggtttgaagccgcgccgcgagggagcgaggtcgcagtgacagcggcgggcgatcggacccaggctgccccgccgtacccgcctgcgtcccgcgctcccgccccagcatgacagccccggcgggtccgcgcggctcagagaccgagcggcttctgacccccaaccccgggtatgggacccaggcggggccttcaccggcccctccgacacccccagaagaggaagaccttcgccgtcgtctcaaatactttttcatgagtccctgcgacaagtttcgagccaagggccgcaagccctgcaagctgatgctgcaagtggtcaagatcctggtggtcacggtgcagctcatcctgtttgggctcagtaatcagctggctgtgacattccgggaagagaacaccatcgccttccgacacctcttcctgctgggctactcggacggagcggatgacaccttcgcagcctacacgcgggagcagctgtaccaggccatcttccatgctgtggaccagtacctggcgttgcctgacgtgtcactgggccggtatgcgtatgtccgtggtgggggtgacccttggaccaatggctcagggcttgctctctgccagcggtactaccaccgaggccacgtggacccggccaacgacacatttgacattgatccgatggtggttactgactgcatccaggtggatccccccgagcggccccctccgccccccagcgacgatctcaccctcttggaaagcagctccagttacaagaacctcacgctcaaattccacaagctggtcaatgtcaccatccacttccggctgaagaccattaacctccagagcctcatcaataatgagatcccggactgctataccttcagcgtcctgatcacgtttgacaacaaagcacacagtgggcggatccccatcagcctggagacccaggcccacatccaggagtgtaagcaccccagtgtcttccagcacggagacaacagcttccggctcctgtttgacgtggtggtcatcctcacctgctccctgtccttcctcctctgcgcccgctcactccttcgaggcttcctgctgcagaacgagtttgtggggttcatgtggcggcagcggggacgggtcatcagcctgtgggagcggctggaatttgtcaatggctggtacatcctgctcgtcaccagcgatgtgctcaccatctcgggcaccatcatgaagatcggcatcgaggccaagaacttggcgagctacgacgtctgcagcatcctcctgggcacctcgacgctgctggtgtgggtgggcgtgatccgctacctgaccttcttccacaactacaatatcctcatcgccacactgcgggtggccctgcccagcgtcatgcgcttctgctgctgcgtggctgtcatctacctgggctactgcttctgtggctggatcgtgctggggccctatcatgtgaagttccgctcactctccatggtgtctgagtgcctgttctcgctcatcaatggggacgacatgtttgtgacgttcgctcatgtgcaggcgcagagggccgcagcagcctggtgtggctcttctcccagctctacctttactccttcatcagcctcttcatctacatggtgctcagcctcttcatcgcgctcatcaccggcgcctacgacaccatcaagcatcccggcggcgcaggcgcagaggagagcgagctgcaggcctacatcgcacagtgccaggacagccccacctccggcaagttccgccgcgggagcggctcggcctgcagccttctctgctgctgcggaagggacccctcggaggagcattcgctgctggtgaattgattcgacctgactgccgttggaccgtaggccctggactgcagagacccccgcccccgaccccgcttatttatttgtagggtttgcttttaaggatcggctccctgtcgcgcccgaggagggcctggacctttcgtgtcggacccttgggggcggggagactgggtggggagggtgttgaataaaagggaaaataaaaaaaaaaaaaaaaaaaaaaaacggaaaaaaaaaaaaaaaaaaaaaaaaaaaaaaaaaaaaaaaaaaaaaaa

SEQ ID NO: 7746 - DNA, 1212 bp, Homo sapiens
  misc_feature (16)..(16): n is a, c, g, or t
tcttctgagttctctntctgggttggctctcttaaccctttctctgctcccagcctgcctcacccagggaaggttggaggggcctccctctggcttctgcatctgcgccagcaaacatcactgccgttggtctctcatgacttaactggcttccctctgctgctgccttggcttcctcctaatgctcgtgctctcctgtccttctgaagttgctccttggccaaatctccagctcccttcttgttttcctcatcctcctaccctgtactcccaccaaaccatggtcctttaaggcacgctcctgtcctcctcattgcccagcagtagggaggggcaggggtaaggggacctgaggataaagggtggggaaacagggtcccctgaggcctgtgggggctgcaggggaggaggatgtaccttgtgtctctttcaagtgccttaatccgagccagcagggccttctgcttgcctgctgccatactgtatgtaggaaagtgttctgtggctgctttgtgtcaagaaaagagcagtcactctcagaatcttgattccccatcagccaaagcaaaagatggctgctgctttgtaggcatgtgcctgcaagtgggaccttgctgggcattatatgccctgtgggggtttcagagaccctgaaagaggagggaggacccgcctccttgtctgcacaactgcatgcacttctctccccatcgctccacaacctgaaaccgagaaggagttgctgaccagtgcccaccccggcagcccgggaggaacacaggcagctcctttcccttcacgtggtctgcagagagcagggtgagctgccagctgcccctctccaccagggtaccctgtcttggtggttaggggccacttttcctttgaggctctagtggaggtggatgtccttctctgccaggcttggcacatgatgtgaagaataaatgcccaattcttactgttcaggtttgatgtggaatcacagctgcagtgatatatattttttatcagtgcttggttggttttaaataaagtgcacgctattttattatcttgttctgaataaaatgtatttactccaaaaaaaaaaaaaaaaaaaaaacactctcagttgttctgatttttcttgttccaaaggcgtccttaaaaacttgggggggtgggccccacggggaattaaccgtgggcacgggggttaccccttgaacg

SEQ ID NO: 7747 - DNA, 339 bp, Homo sapiens
gtttcaaaagcaaaagtcccctaccagccagtgaagctacctgatttttcagtattttacgcccagtgacacgatttaccctcaaaacttaaaaaaaaaaagggaaacataaacacataacagcagcagcaataattaaagatgagatgagaacagttaagaaaaaaggaaaggtttcctgtgactgttttatttttagggaaacagagaggaagaagaatgatttttcttttgatgactctatatccaactttgaggtttgattaaagaaatgcccttgaaccccagcaaagaaaaataaaagacaatttccagtaaaaaaaaaaaaaaaaaaaaaaa

SEQ ID NO: 7748 - DNA, 1668 bp, Homo sapiens
gacggggggaggggaacgaagaacggaagggggggggggaggagggggcgacggagagaagagggagggggaaggggagggggggctgggtaccgggtccgggaattctcggggatcgacagttgaaactgcttctttttcctcctataattttaactaactgtaaagatggatgtggcattttacggttttaatgaggaaagggcgattcatttcaaaggcctttgtttagaatatgctgtggggccgtaagctcagaatgagggcagggaccattttggattctgagagtcgatgccatttggtccaggagtgtgtctacagtcccctgcattccagctagtttcttggggattgaaacttatgtgaagggcatttcacctgttcagttgggccaaaggtcaaaacgtagcaatacttggggaaagaccacataaagtcacactgcaagtgctttccctctttccccctacacacagggcacgtgctttttcttggattgcagacaatttttacagtttttttctgactttattgtgaaagtttgtttcaagcatttcttgatatcatgttatgtactatttttatgatttagtcaacatgcatacaaagaaatgttttttatgaagtgctcacttccattttactttgcattgaaatcaaattgggctgaacacttcaatggaatacattttgtggacaatgtcactttagaatctttcatctcagtgaaggattacacattctcaatacttccataattgcaggttgtgttcatttttttatatagtttttgtaatccaaagaatattttgctagatttgcacagatctccaattgaatttgcaatgaagaaataactcaaaaggaatatgaatagcatttaaataagtatacagctgtaagtaaccctgtcaccatggatgatccttttctctaggaatgtatttggattagagatgacaactacattttcgcatttttatgttgaagtcttttttaaaaaggctgtttacttttcagtagttaagaatacttgtttttctttttcttttttttttttttttaccttttattttttcgttaagcctctattgtttgtagaacactcttagaaacttggaaataaaatgtctttcccaactagtggagtcctttttcatttggagcacattgccttaaaagaagtcttaatttaaacggtccttccttattctaaagtaatcactgttttataccatctatgcagctaaaagaaggaacatgcttctgttcttttcctcaagtaatggttattgtttctagtcatcattcattcattgattcattcattaattcatcaaaatccttattttataaaacctgttccacttactgggggattcagaatgaatcttactacctttttctggaatctttttgataattcaagccctgtaacaaagtatccaaccttgttgccttataatcacctatttacctattttcccctcctagaaaatgcaaaaagatatttttccctcctttccaaatttggagggaagaacattaaaagaatataaccgggaaaggaaaattggtgaaaaaacaaaaaagggggaaccccgaaaaattaaaggcccaacctgtgggggccaaattcctgggaaaaagaatccttttgggggc

SEQ ID NO: 7749 - DNA, 2574 bp, Homo sapiens
cggggtcaggagatcgagaccatcctggctaacacggtgaaaccccatctctactaaacatacaaaaaaaaaaaagtagccgggcgtggtggcgggcgcctgtagtctcagcactttggaaggctgaggcgggcggatcacgaggtcaggagatggagaacatcctggctaacaggtgaaaccccgtctctactaaaagtacaaaaaccaattagccgggtgcggtggcgggcgcctgtagtcccagctactccggaggctgaggcaggagaatggcgtgaacccaggagatggagcttgcagtgagccgagatcgcgccaatgcactctagcctggacgacacaaggagactccatctcaaaacaacaacaacaacaacaacaacaacaacaacaacaacaacaaaaacaacaaaaaccagctgagcagcgcgggccttctggcagcgggtccagctccagggcgccctagggcagcggcgtgcagtgttcgggtaataggacgcagacggtggggtcgccgggggcttcggggtggcctcggccccaggccatccagccctgtggaccgaatggagtcccacacgctgttgaggtagttgtgggttcccctggcctcgggctcggcgcagggtcagcgctcctgcaggcggcgcttgcggtacgggctggtgaaagtggagacggacggcaggatggattcacttggcgacatggcggggagctgggaagacggacaccgacctaagtcaatgttagtctaccactgtacgtttggtaacctcaatccctgcaaccggagcaaaatgtgattccaggtcttggcaacctctgaaattccaactccatttgcgagagctttgaggaggccatatgctgatttcaccacaagcaacttcacaacccagtactggaatgccatcagccagcaggcccctgccattatctgtgacttctatctgtggctcattggaaggaaacccagctaccgaaggaagataccctcatcaacccaattttacaaatggagaaatagaagctcagggaagaatctgaagtagtctcaaaggaagtgacaggaaggatgtggagaaagctgagtgtcaaagtcagtattcaagaccggatttactgctacttagagatgaatgaagaaatcagagggaacgcagtgtgctgatgctaaagcggctgtcaccacccagctgtgtgacataggacatcttctttctctgtctcacttgactaatatgttgtgtcaggggagacatgattgtaattgcctaaagcaattcttgtgatcaagaatcagaagcatgaacagtattgccctctgtgttagcccctttataagggaggaagtcatcttcagcatgctgaattgtcatctttcttagcagtgcaaatgactaaaacttagccaatgtagagtttgtccaaatttggagctcataactcagttcttgagcaaagtgaaaagaaaacattgtgattatggggaaaatatttgtacgggacttatcaaataaagataggaaaagaagaaaactcaaatattataggcagaaatgctaaaggttttaaaatatgtcaggattggaagaaggcatggataaagaacaaagttcagttaggaaagagaaacacagaaggaagagacacaataaaagtcattatgtattctgtgagaagtcagacagtaagatttgtgggaaatgggttggtttgttgtatggtatgtattttagcaataatctttatggcagagaaagctaaaatcctttagcttgcgtgaatgatcacttgctgaattcctcaaggtaggcatgatgaaggagggtttagaggagacacagacacaatgaactgacctagatagaaagccttagtatactcagctaggaatagtgattctgagggcacactgtgacatgattatgtcattacatgtatggtagtgatggggatgatagaaggaagaacttatggcatattttcacccccacaaaaatcagttaaatattgggacactaaccatccaggtcaagaaaagtcacatgccatagccatggtattgcacatcattcatcttgcattctttgagaataagaagatcagtaaatagttcagaagtgggaagctttgtccaggcctgtgtgtgaacccaatgttttgtttagaaatagaacaagtaagttcattgctatagcataacacaaaatttgcataagtggtggtcagcaaatccttgaatgctgcttaatgtgagaggttggtaaaatcctttgtgcaacactctaactccctgaatgttttgctgtgctgggacctgtgcatgccagacaaggccaagctggctgaaagagcaaccagccacctctgcaatctgccacctcctgctggcaggatttgtttttgcatcctgtgaagagccaaggaggcaccagggcataagtctactcacttatatctgtttgtctggaacataacccatgtttgtttttacaacaaataaaattgatcttgaataaaaaaaaaaaaaaaaaaaaaaaaaaaaaaaaaaaaaaaaaaaag

SEQ ID NO: 7750 - DNA, 1196 bp, Homo sapiens
  misc_feature (36)..(36): n is a, c, g, or t
gaaaagtttggggaaaaattgcgggaggaggcagancctttttcacccagtttttaaccctgggaggcccgttgtgttttttaaaagaggggaggtccatatgggatttttaaaaacgggggaatgttcaaaatggtccaaatcggttattattaaaataaatcctgaatacaattaaagacaattatgtatatatatatattatatatatatatatatatatatatatatatatatatatattggaattttaagaaaattaaattctctttcaaattagttttctaccaaatccaggatagataaaagcagagctggaatgattttgaaatctaaacttattttggctttgaataactttcaattcgattctcctaatacagaacatctgtttttggttgtggttatacgaagctgttatttcacagatagagggaaatggcagagaactgatcagaatccctttcgtggggtattttttttagaaaggaaaataaactaaggacaacattacattttccccaacccctcaatgtgtagactgagatcctgaatatcttgtcaaccattccagtttaacactttagtgttaggataattctaatcatttttttaattaaaagagaacatataaaagtatccagagttcttccagtttcatacagaactccaaataaattttcacagaatgaaaaatatttctgtacaaacatttaaaatgggctgcaataaaatgccaacaagagaaataatgacccttccatgacctttgtggtgatgacccctccatgaggagttcagttgcatatttctgcagcaaaagaagctggagatgtgactggcctaacttctaaaaatcccaaaatctcccaacaggtaccaaaaaggttcatttgtaatgacagttcatttgcatttaacagctatatccttcttaaatcatttccttcaatcctgctacctaaactttaatgttaccaaaaaagttagaatttcagttcttgttaacaatgcacataaatccaaacttggaaaatattacaaaattctttcaaaagcttcaaatacaacacaaaaattgtccatctttataaattgaaaatttcccacccccctgcccccccgactaaaatagctcccccacccacctgaaaaatctggaactgaaatcttctatgtttagcaaaatgtcccag

SEQ ID NO: 7751 - DNA, 510 bp, Homo sapiens
ttttttttgtgcaactctttgttttcttgtagtgttctgtttatttaactttctctgtatttatcagttattcatccttgaatgtttcaccagccatctaaatttcctcttaggacattcaggtgtattggtattctaccagtgtcatttttctgacggtctctcctgaaaccttcagtcctattcccactagactggttgcccttcaaagttgtcattcctgggatctccagttctgtcatccctgtattcctgttgcttctctcccatgttagatctcttatttcctgtatcccatgtctgtctttcgcttgatttatccttttgttctggtggaacacaacctgagaaagggtacataagagataaattttgtgagaaattgcatgtgtaaaatgtctttatttcacccataaactcaagtaataatttggctacatatagattgtgatgatgttgttgagatatctgaagccattctcattcctgatgcttattatgtgaaatatt

SEQ ID NO: 7752 - DNA, 2684 bp, Homo sapiens
  misc_feature (1422)..(1537): n is a, c, g, or t
aacaaattggtaatcggtggttaaataaatatgcccaaagtcccacagctagaaagtagcagggctggaatttgaacccagtccaataaaacctcaaaaccggtgcactttctaccgtatcctgaggcttctttactttggggccctggttagccttagtagcctagttttctacatccttcatgccagttgaatgaaactactgacatgctccacattcttctttctcccatgcttttgttcattcagttacctcctcctaaaatgtctgcatttacccagataatcttccaatggaaatccatggttcaagtgccacctcttcaggaaagccatctgacttcaatcaggaagccagagagctccgtctgcagcagctctttcagctccttcttgctcagcttgtacttgtccccctctttgcccgagtgggcgtggaacacgttgatgagggtctccatcgccgtctccagctcagagcccattgcagcagtgcacctacccacccccatcatggaagtgagctgaggaccaggcccggagtacctggggtctaggcagcagtggatggtgcaggggaaagaggtgggaaggaggtcctgggagggacactggatgtcttaccccaagctgggccttgcagtacctgtggctggctgtgctggttgagcccgaatcgaccacggaaatttgacacctccgggcttggaagcagctctctcctccttccccgctgcttataaacctcagccctgaggctccagctcactctaccccatctccttgccgggtgagtctcatggctgaccctggagggaggctggagatcattttttcttcctgggctcccaggtccctcccccagagccagctcagacaggaattcaggaaggagctttggatgatcgagcaacagcgcgtgcaggagtgtgtgacggggtggacagaaaagagaatgcctcttccagccccacccgccgcaccccagggggttgtgagtgcctgtactaaacccgtcctggagcagggagtcagagacgccccgttccaggacccttgtcaccgggagacaggagcggggaggatctgtggggtcctgggttcagcactctgccctgctgccgctgaggagaggtaagggtggagcggggcagagaaaatgggtctgttcagacggagccagctctgaccacaggggacatttgccagaccctgtgcttctctgctgggaggagcggttagagtgtgtgtgggcggatgcgagtggccggagaccagggcccaacataaacaagctttggagacaaacaaccttatgacctgtgagtctgggtgagacaagaagggattcttgagacagacacgccacagaggggccaccagacttgaaggactccaagaaggaccttcaactgaagaccnnnnnnnnnnnnnnnnnnnnnnnnnnnnnnnnnnnnnnnnnnnnnnnnnnnnnnnnnnnnnnnnnnnnnnnnnnnnnnnnnnnnnnnnnnnnnnnnnnnnnnnnnnnnnnnnnnnnacctacagaagagggggtttctggagctgaatctcctgcccccaccaaaactgagatgccgttgcctggtctgctgccccaagctcaacccctgtcctctccctctttccccatatgccccctccaggctgagactgatgtgataacaccaaggcagggaccttctgaaccattcctgcatcttggggctccctgactctccctctctgctccatctccttgccgggtcagccctgacaaaggtcagctagccccttgaggacatcagctttggcctcagggtcctaatggcagcagaaccactgacagagctagaggagtccattgagaccgtggtcaccaccttcttcacctttgcaaggcaggagggccggaaggatagcctcagcgtcaacgagttcaaagagctggttacccagcagttgccccatctgctcaaggatgtgggctctcttgatgagaagatgaagagcttggatgtgaatcaggactcggagctcaagttcaatgagtactggagattgattggggagctggccaaggaaatcaggaagaagaaagacctgaagatcaggaagaagtaaagccgcctggctgagatggggtgggcagggcagagctgatcagggccgagcagaaccgcactcttcccaaataaagcttcctccttgaaaaaaaaaaaaaaaaaaaaaaaaaaaaaaaaaaaaaaaaaaaaaaaaaaaaaaaaaaaaaaaaaaaaaaccacacgccagaatagaagaagaaaaaaagataggggcggcgccgacaaaaaataaaacacggtgagcggcacaaaaataaaacagaaacagcgcactgatagaacaagcagggcaccccacggacagcccgcaaacaacaacaaaaacgaaagcacgaacgccaccaaaaaaacaacgggccccgaagccgaagaacacagacacgcgagaggacacgaaataacgcaaagaacaccacaccagcagggggggagaaaaacaaagagggaacacaaccaccaacaaaagaaagaacccgcgcagcaagagaaacacaaaacagagacagagagggggagaaacccgccacaatatacgcgggcaaaagacgcggcaccacaaagagcaataagagaaataaacag

SEQ ID NO: 7753 - DNA, 2060 bp, Homo sapiens
  misc_feature (1960)..(1960): n is a, c, g, or t
ggaactgcagcgcttagagattccctattaaaaaaaaatagaattgatgcaaacagcctgttccttccaccttcccccacccttctctgccaaccgctgtttcagcccctagctggattccagccattgctgcagctgctccacagcccttttcaggacccaaacaaccgcagccgctgttcccaggatggtgatccgtgtatatattgcatcttcctctggctctacagcgattaagaagaaacaacaagatgtgcttggtttcctagaagccaacaaaataggatttgaagaaaaagatattgcagccaatgaagagaatcggaagtggatgagagaaaatgtacctgaaaatagtcgaccagccacaggttaccccctgccacctcagattttcaatgaaagccagtatcgcggggactatgatgccttctttgaagccagagaaaataatgcagtgtatgccttcttaggcttgacagccccacctggttcaaaggaagcagaagtgcaagcaaagcagcaagcatgaaccttaagcactgtgctttaagcatcctgaaaaatgagtctccattgcttttataaaatagcagaattagctttgcttcaaaagaaataggcttaatgttgaaataatagattagttgggttttcacatgcaaacattcaaaatgaatacaaaattaaaatttgaacattatggtgattatggtgaggagaatgggatattaacataaaattatattaataagtagatatcgtagaaatagtgttgttacctgccaagccatcctgtatacaccaatgattttacaaagaaaacacccttccctccttctgccattactatggcaacttaagtgtatctgcagctctacattaaaaaggagaaagagaaataacctgtctctcattcctaagttgcctcattaattttcatgaacaagaatatgtacctttttgatgctatattactgcgattaaaaagttcttgcaggtaatgtttatgatatgttaaacgttgtaatttcttatcgtaattataacattcccattcttttgtagatgaaacttctacatattgaaccacagattttctgagcttctaaatgtagcctttcattgcacatttcagtgatcagaatagatatccttttacacgcacaaaagcaatagattcattcagtggacaagttccttgtttaactacacagctatgatggaatgatatatccaagttccttgcctcagtgaaatatgcatatgtatatcatgaaagtgggatgccaagtaagcttaaaatggcattctctagcaaagagattagacttttaaataactcttataaaacaggttggcgatcatttcccaagattggtttcccttgagtttttgctaaaacaaatcttagtagttttgcccgtttaaaacaactcacaatcgtaaatgctactattcctaagatatcttacctttttatttcagtttagccatgtattgtatgagtgtattagtctaagcagtgagaatcttttctatgcctctattccagcaaaaagtagaagtatcaaataaaaagggcaacttttaaaatattaagcctgaagacttctaaaaagacaagaaacatggcctaaataaccaacatagatttacatagtaagtttcacactaccttattaccaaaagcaaacacctcttactttaaactacattatcatgtatatctattgtatgctggtctttactttttgccaaaatcaacatataatgaagagatgcctttgtttcatgagattcaaacttgatgctatgctttaaaataaactcagtacttttagaaacataaaaaaaaaaaaaaaaaaaaaaaaaaaaaaagcgccactgagggggccagacagaaaggacagcgcaagtgccaaccacatgtacagagaagaggccgagaagaatatgnaagaaccgatagcagaacaagcaacaacaagaaagacaggcagaagcagcgcacaccaccacgcccaccaccagcacatctaactggaaggagaacgaag

SEQ ID NO: 7754 - DNA, 739 bp, Homo sapiens
ttttttttttttttttaatctctaactttgtagattatattctgaatctctaaaatggcaagaacaaggtcttggcctttatagtccctcattagttcaaatcttcaggtcggagcttcccctggcagccaagcctcttgtgagcacttgtgaatcctttcattctgagatgctggagtttgagacctgtggactatgaagacagtgcctggggagagaggatgagaaagcaagtgaaagggtgcgaactggaggcaagttcagcagcaaaggagcctggcccccaatggcctctggggtcatcagggtcattgtccagcccaagtcccaggcccagaagaaaatcctgcgtacaactggcatgtacagctggcatgattggctggggacaaagcgctgggacccatggaagaaaggacagactgacctccggccttaagaggagagacctgggggaggagctgctccagcaggaaatgccagagctgggcaggaacaatagcggggtttctttagcccttgttttctttggcatcttagctgccacagagcccagagcccgctcctccaagtccttagcattcctgcaggctcctcccctcagccctgcctgacaaactgacagaggaggcacctgttctctacttcctctgcaccctcccgctggactcttccccctagcttagcaccacactaaaccctcaaggggcttttaaaattaacagtcacaacgtaaaaa

SEQ ID NO: 7755 - DNA, 1591 bp, Homo sapiens
ctattacaatcaacaacaagtcattattaccctcactgtcaacccaacacaggcatgctcataaggaaaggttaaaaaaaagtaaaaggaactcggcaaatcttaccccgcctgtttaccaaaaacatcacctctagcgtcaccagtattagaggcaccgcctgcccaggtcttccggatgtttccagatatttgtgcctcacaccagagatcatttttcagagaaaaccaacagatcaccgtctaagtgcgtcgcttgggcgccccaccccgtctgcgtcctgcatccatctccctgttacagtggcccgcatcatgattaaagaatgtggatccctctgtctggggtgggatgccttactttgcacttaatttaataagggcattctcggaggagtagacgtttaatacgaagtggcggcatagccctgccgagatgtcggtgatggcctggatgctgtaaaccacaacctgtggctaaaaattttattttctatcctttacccgtcattatcattagttgctatgattctttctgcattttcggttaactatcatttccaaagacttgtcattcagtaatattagcagatagctgctttgataaaggaatttggagtttaaaaatcaacttgtgaaaacaaggttgtttttgtctttatcttttgttagagttatagatttatgatttcataggcttgattctatgtgaaatatctttttacttttatgcattttaataagatttaaaaatatttagattaaagccccctttaatgagtacaagaaaaactcttggcttgttagaagaaagtatattctttctagaatttggtgcaggaatatgtgttcatatccaggcaaacgggtgtgtttttatcttcagacaatgaaaccttctcctctggggctttgttgccaggaagattagaactaaatttatttttttcatttctgtcatgaaatcattccagatacctcttttcttctttccaaatggttttcacatgtgtttgaaatatttgtacttcgaattgtcggattttccatgtcctcctttctcctttgtgcccagcctgagtcagcaccatcccgcattcagaacctcccagtgaaagggcagccttcattttgagaaggtggaaggtgttagggtttgggagacagctcatccaatctcccaagtctcatggtggatttgtgactgtgagagtttccggtttaaaatctgaaaagccagatatgcctgtttccttttcccagcaccatgcctgtggaggggacagtcagacccagaggtcctttacgtgtggatggagttcacaggcgaatagaggagaggaccaggggacgtggcttgtcccttttgtccaacaaagcattatatttttaagaatggcagacctgtttgctgaagtgttcataagataacaataggcttgaatctccaattcaaatgaatgtcaaagcacatatctttaatatgctgaatgaatatttatttttgtatccattaaaacagtatattgatctcttttattctttattaaaataaaatgctcttttttaaaaaaaaaaaaaaaaaaaaatt

SEQ ID NO: 7756 - DNA, 1981 bp, Homo sapiens
cggaaatcgcggggagggtcaaaggagacccggtctccgaggctcatggcgatgctggtcctagtacccggacgagttatgcggcctctgggtggccaactttggcgcttcttgcctcgcggactcgagttttggggcccagccgaggggactgcgagagtcttgctgaggcagttctgcgcgcggcaagcggaggcgtggcgtgcctcggggcgccctggctattgcctgggaacccggcccctcagcactgcgaggccgccacccccgtggtcgcagaagggccccggagactccacgcgcccctcgaagcccgggcctgtttcctggaagtctttagcaatcacatttgctattggaggagctttactggctggaatgaagcacgtcaagaaagaaaaggcagagaagttagagaaggaacggcagcgacacatcggcaagcctttacttgggggaccgttttccctcacaactcatactggggagcgtaaaactgacaaggactacttgggtcagtggttattgatttattttggcttcactcattgccctgatgtctgtccagaagaactagaaaagatgattcaagtcgtggatgaaatagatagcattacaactctgccagatctaactccacttttcatcagcattgacccagagagggacacaaaagaagccatcgcaaattatgtgaaagaattttctcccaaactggttggcttgactggcacgagagaagaggtcgatcaagtggccagagcatacagagtgtattacagccctggccccaaggacgaagatgaagactacatagtggatcacacaataataatgtacttgattggaccagatggtgagtttctagattattttggccagaacaagaggaagggagaaatagctgcttcaattgccacacacatgaggccatacagaaaaaagagctagccaaagcagtgttgctggatgcagtattctcttgctaagaggaaggaaactgtctcgcataggagcctatataaatataaacatatatacgtgcactctacagaatggccttcataccatgagaacatttctgttttggatggggatgttacccttgcgttcaaccaaaattgattcttggaactgtaaagattacaacccaaagtctcccaggaagctgtggggagaccagaggatcaagctgaagtgaagccagtgaagagcccacctgtggaaggacatggcggggcgaggcacagccagtgcattcctgcctgcgaacaggccctcccagcagctttgccgcctctccatcgtcttgggcccttgctcaaatagctgtgggactgaatttcacagaaaagaatataatttccatagtgctcttgcttgcctcttcttgagttctttgctcttctgagttcttggtggctaataacagtcagattagggtctctgccattcagagttgatgcttgaaaactttagttttccttattaatgaatatcactatcagatttgactaatgaagaggaaatctattgtttgggggaaaaaaaacatcagtttgatttctctaggggttcttttatgtgatttttagctaagtggtgtgccaggttttcagtgacataccaaatggaaataagaggatattgatcacgagtgtgatgctgagtacctttctgcatatactggattgtactttgtgtaaagtaaacatactcagttttgctgttcaaaaaaaaaaaaaaaaaaatcatgggtgatgagtgggtacatagatggctgcacacagttctcagggaagagacccacaggctccagcgggcaggtgggtgggacgcttgctgaagtgcagttccccagacccagagctgaattcactgaatctgcagtatgatgcagagacctgcttccatgacagataccccaggtgactcggatgctggcggactgggaccatcccttaagaaagtgttttttggg

SEQ ID NO: 7757 - DNA, 2972 bp, Homo sapiens
cgactcctcgggcagcctcaacgagaactcggagggcaccggagttgctctaggtcgtaaccagcctttgaaaaaggagaaaccaaaatggaaaagcgattatcctatgacagatggacaactacgcagcaagagggatgaattttgggatacagcaccagcttttgaaggccggaaagagatttgggatgccttgaaggctgctgcacatgcttttgagagcaatgatcatgaactggcacaagcaatcattgatggtgcaaacataacattaccacatggtgcacttacagagtgctacgatgaactggggaacagatatcagcttccagtgtattgcttggcaccgccaatcaacatgatagaggaaaagagcgacatagagactctggatattcctgagccaccacccaattctggatatgaatgtcagcttcgtttgcgcctttccacaggcaaagacctcaagcttgtggttcgcagcacagacacagtattccacatgaagagacggttgcatgcagcagagggagtggaaccaggtagtcagcggtggtttttttctggcagacctctcactgacaaaatgaagttcgaagagctgaagatcccaaaggactatgttgtacaggttatagtgagccaacctgtgcagaacccaacaccagtggagaactgaactgagccctgttggccagctcccacatccctctgctcctttttatggttcttgttgtcatttcctactctgcggcgtgaaatctatttcactgctctaaattccctatgaatggatttagttctgaggaattaccagtgaaaaattccatctgtgatggagaccaacaaaaataataaaacacaaagagccaggctttgagactcatgtaattacaattcttaatttgaaaggcagttaagaaatagataaccatttattttagaacactcaacaactatgtaatggctatatttcagtgacttggactgtaaatgaaacattgcatccatgaaggacagcaccaagcacctttttgaatacagaatttttttagaaaaatatatcaaattatataatttccagaaaccataaataatggatataaaacttaaaaaaaaaaaaaaaatttgttttgttttgttttgttttgttttggttaatggaaactgaaaagagcagtatttgaggttgcttctattctggttttttattcttagctcaattaatatttagccataaatgagtagagactggcaaattgtgctttagtgttgctttcctcatccccacatcttgagctccttatttacattcacactaaattttggtgccttccagcacattagtggcaggcacccttctggaacactaggcaataatttcatcaatacagtcaggtctcttgagtttcaacagatactcagttgaaaagtcgctgtcatcttgctgcataagtattttgaaaggtctgtataacgaagccatttttatatccaggcttagaaggtcactactatatagtaccttcattgatctatctattctgcttggaacttttcatagctaagtataacccccaaatgcatggttcctgggtcaggagacaccaaaatcaattatagctgttcccactcaagttaataaagtaaatgatttcctccactttgcatggaggggtgtaaggaaagcctattttatctgtgcctgggagaactgtgcctattttcagtcttttagaggaaatttcaactcaaaatttttaagtgtgaaaggtttactggtgtcacataaacattagcagtgagaccaaataatgaaacattgctttataccttagtgctttccagttcactgttacctctagtcatggtagatgacaattttcctccctcatcttttgtagcaaagaagcaaattaagagccttttgcaagttagattaggggactgaaaaatccagggagataacctgattcttctatactatgactggagtaaagctgccaagagttaggttgaatttggagccttttaaaagttggttccataagtgagaaggggggctaacatgtgaccactgtgcccctgagaatccatgagatggaaaagtacagacaagaaggcacttaacgctgttctcagttggaaaatgtcagccctccacacctgtttggatgtgaagtgcattattaattttaatgacaaaatgaaactgctaattagtttaaatgtaatgtttaaatggtattgaatttcctattgcctgattaaatatatctgtaattgtaacatcatgtttctgagagctttaactacttccttatttttatgcaatcattttaaagattgtggctatatctaatttaaatttgctgatgattgaatctaaattcaagtgaagaccacagcattaatcccaaaggagattttttttatgtttagaggtggagatattagggtaaatcagtatattgctcctgtcatcaaagtttttgttcatttgtgtgccacatcgaatagcagcacttctcaaagtttgtcaactggaaaaaagtgtttaaaactgtttttttcttaagcagatttggtgatgtcatcaatatctatgatatcgattggtaaaaggtctttctttgttgaggatttgagctctctttttaagagtttattttattttaaaggaacatatgctttgaataacaattctctgggcatgtttaactaacctaggtgggaaaaccatggtgctgtttaattgtaaatagattgatataagattggaccagtacttgatgtgtataattttagtatgtagggtttatgtgctttttttaaaaaaaaaaaaaaggttcaattttaaaaaaaaaaaaaaaaaaaaaaaaaaaaaaaaaaaaaaaaaaaaaaaaaaaaagaaaaaaaaaaaggaaaaaaaagaacaaggaaagacaaaaaaagaaagagaaaacaccaat

SEQ ID NO: 7758 - DNA, 2020 bp, Homo sapiens
tacaggctcaaagcaggcgacgggacaggaaatgagacaaccttttcctcccactgacaggggcttggagcttctgcggggcttggccgccgtccgtgagcacccaggccgggaccccacatccccaggccagccctgaccccggcggcccctccgccgggattcctttccgaggtactggtgccggcccaagacccgggcagcgctttgtcgtgtccgcccctcagtgatcagctccgggtccccctgctcggccccgcgcgccccaagcgcagtccccggaagtgcgcgccggggccccagcaaagagtctgagaagccaactggggccaaacaagttttagaacctctactggctgatgccaacatcatcagatatgaactgttcttaccagaaacttctctgctcctgacaccccacctctccccagaagagaagaaggagagtggccacgttgattcagccaagcacctccaggaggtcccctctggatgtcccatgaggctgcccctcagccacagcccagagcacgtggagatggctttgctcagcaacatcctagcggcctattcctttgtctcagaaaatcctgagcgagcagctctgtactttgtttctggcgtgtgcatcgggctggtgctgaccctggctgctctggtgataaggatctcttgccacacagactgcaggcggcgtcccgggaagaagttcctgcaggacagagagagcagcagcgacagcagcgacagcgaggatggcagtgaggacaccgtgtccgatctctccgtgcggagacaccgccgcttcgagaggactttgaacaagaatgtgttcacctctgcggaggagctggagcgcgcccagcggctggaggagcgcgagcgcatcatcagggagatctggatgaatggccagcctgaggtgcccgggaccaggagcctgaatcgctactattagggagcagcaggaccccggaaaccactggaggccgcctggaaaggagagcgtctgcagggacagtgggcacaaggaactgaacccagctctgctaatattgtgatttcagagaaaaagcaggacatgccccttttctagccaggaggattgctcctttttggccaaatgtatggagaagtagaaaaatcaaagcagttcatcaccctttccaggtctcggaatggtgctgaaaaatcctctccaacactgtggatggagatcggagaaacgcgactgtggtttctcttgatttctgaggatctcagaagtttcagcagacttccttgctctgtgttattcctttgcaaaaggaaagatcattatagcatgagggctgggaatagcagggtgaacttaacccaataaatgcaatttcctaaatgacttcatgctatggaggtgattctgattcaaatagcatgatccatgcttattatttaaggctgatttttaaaatcttgtgttgcaagggcaacctcgtccattttaactggcacctcagggattaaaatcctactttttagtgtagttcccacctcattcatgaaaatgaatagaactattgtattatgggagatgtgtcagtgaactagaaaatgtcaataacctcaaaggatgaagggtttttattttaaatagtttataaaatatatattgacatgcatatttgaaaatgctgcataaaaataaaagtggtgtgttttccccctctttggagacaagaaaaaaaaaaaaaaaaaatagataattgtgattttaaacactttgttttttttttttttttttaattggatttcaaagaaaagaatggaaatgagaggtaaggattaaagccagttggtggggtgtaccaaaaacttgttaatctaaaaaaaaagggggggctaaataccggggccagttatggcccgtttgtaaagccccaaggggataaaacaggggggcaactcaaggaagcacggttgggagcactgcggtggaccccaacggcatatggtagccggttggaatacatataacggc

SEQ ID NO: 7759 - DNA, 2086 bp, Homo sapiens
aaaccttatcggctaggtagcgaggccgaagtggcagcagccagagaggcacgagggtggacgcgatgccgccgggcgcttagaacagaggcttgcacaggtggagatgtggaagtctgtagtgggccatgatgtgtctgtttccgtggagacccagggtgatgattgggacacagatcctgactttgtgaatgacatctctgaaaaggagcaacgatggggagccaagaccatcgaggggtctggacgcacagaacacatcaacatccaccagctgaggaacaaagtatcagaggagcatgatgttctcaggaagaaagagatggagtcagggcccaaagcatcccatggctatggaggtcggtttggagtagaaagagaccgaatggacaagagtgcagtgggccatgagtatgttgccgaggtggagaagcactcttctcagacggatgctgccaaaggctttgggggcaagtacggagttgagagggacagggcagacaagtcagcagtcggctttgattataaaggagaagtggagaagcatacatctcagaaagattactctcgtggctttggtggccggtacggggtggagaaggataaatgggacaaagcagctctgggatatgactacaagggagagacggagaaacacgagtcccagagagattatgccaagggctttggtggccagtatggaatccagaaggaccgagtggataagagcgctgtcggcttcaatgaaatggaggccccgaccacagcttataagaagacgacgcccatagaagccgcttctagtggtgcccgtgggctgaaggcgaaatttgagtccatggctgaggagaagaggaagcgagaggaagaggagaaggcacagcaggtggccaggaggcaacaggagcgaaaggctgtgacaaagaggagccctgaggctccacagccagtgatagctatggaagagccagcagtaccggccccactgcccaagaaaatctcctcagaggcctggcctccagttgggactcctccatcatcagagtctgagcctgtgagaaccagcagggaacacccagtgcccttgctgcccattaggcagactctcccggaggacaatgaggagcccccagctctgccccctaggactctggaaggcctccaggtggaggaagagccagtgtacgaagcagagcctgagcctgagcccgagcctgagcccgagcctgagaatgactatgaggacgttgaggagatggacaggcatgagcaggaggatgaaccagagggggactatgaggaggtgctcgagcctgaagattcttctttttcttctgctctggctggatcatcaggctgcccggctggggctggggctggggctgtggctctggggatctcagctgtggctctatatgattaccaaggagagggaagtgatgagctttcctttgatccggacgacgtaatcactgacattgagatggtggacgagggctggtggcggggacgttgccatggccactttggactcttccctgcaaattatgtcaagcttctggagtgactagagctcactgtctactgcaactgtgatttcccatgtccaaagtggctctgcctccaccccctccctattcctgatgcaaatgtctaaccagatgaggttctggacagacttccctctcctgcttcattaagggcttggggcagagacagcatggggaaggaggtccccttccccaagagtcctctctatcctggatgagctcatgaacatttctcttgtgttcctgactccttcccaatgaacacctctctgccaccccaagctctgctctcctcctctgtgagctctgggcttcccagtttgtttacccgggaaagtacgtctagattgtgtggtttgcctcattgtgctatttgcccactttccttccctgaagaaatatctgtgaaccttctttctgttcagtcctaaaattcgaaataaagtgagactatggttcacctgtaaaaaaaaaaaaggaattaaaaaaaaaaaaaaaaaaaaaaaaaaaaaaaaaaaaaaaaaaaaaaaaaaaaa

SEQ ID NO: 7760 - DNA, 1370 bp, Homo sapiens
  misc_feature (1226)..(1226): n is a, c, g, or t
agctgggtttgaatcgggcgtgggtggcgattcggtcgaggacacgtttgcccctgctgcgatgaccctgtcgccacttctgctgttcctgccaccgctgctgctgctgctggacgtccccacggcggcggtgcaggcgtcccctctgcaagcgttagacttctttgggaatgggccaccagttaactacaagacaggcaatctatacctgcgggggcccctgaagaagtccaatgcaccgcttgtcaatgtgaccctctactatgaagcactgtgcggtggctgccgagccttcctgatccgggagctcttcccaacatggctgttggtcatggagatcctcaatgtcacgctggtgccctacggaaacgcacaggaacaaaatgtcagtggcaggtgggagttcaagtgccagcatggagaagaggagtgcaaattcaacaaggtggaggcctgcgtgttggatgaacttgacatggagctagccttcctgaccattgtctgcatggaagagtttgaggacatggagagaagtctgccactatgcctgcagctctacgccccagggctgtcgccagacactatcatggagtgtgcaatgggggaccgcggcatgcagctcatgcacgccaacgcccagcggacagatgctctccagccaccacacgagtatgtgccctgggtcaccgtcaatgggaaacccttggaagatcagacccagctccttacccttgtctgccagttgtaccagggcaagaagccggatgtctgcccttcctcaaccagctccctcaggagtgtttgcttcaagtgatggccggtgagctgcggagagctcatggaaggcgagtgggaacccggctgcctgcctttttttctgatccagaccctcggcacctgctacttaccaactggaaaattttatgcatcccatgaagcccagatacacaaaattccaccccatgatcaagaatcctgctccactaagaatggtgctaaagtaaaactagtttaataagcaaaaaaaaaaaaaaaaaaaaaaaaaaggaaaaaaaaaaaaaaaaaaaaacggggcgggaagggcggcccgctctagagttatccctcaagggggcccaaagtttaccgcgaccccaagctttttttggacaaaagggggcccctaaaagggagcccgtatttataaacttagggcacctggcccggtccctttttaccaacctccntggactgggggaaaaactggctaactttgggggatcttttggtgaaagggaacctttaccttcgtgggggtggggaaacttaatttgggaacaaaacttaccttaccagaagatttaaaaagcctcttaaagggaaaaattata

SEQ ID NO: 7761 - DNA, 1697 bp, Homo sapiens
gccacgaggcccatatcctccctaggtacacgaaatcctgctgcacccgcgctacttcggccccaacttgctcaacacggtgaagcagaagctcttcaccgaggtggaggggacctgcacagggaaaatcaagactgtctggggcagacctgagaatctgcattttaagaagatgattctcaggcatcccgaagattgagatctgttgcctcaaggactagagctaagaatccctgctgcaccgccgatacttcggccccaacttgctccacacggtgaagcagaagctcttcaccgaggtggaggggacctgcacagggaagtatggctttgtaattgctgtcaccaccattgacaatattggtgctggtgtgatccagccaggccgaggctttgtcctttatccagttaagtacaaggccattgttttccggccatttaaaggggaggtcgtggatgctgttgtcactcaggtcaacaaggttggactcttcacagaaattgggcccatgtcttgcttcatctctcgacattccatcccttcagagatggagtttgatcctaactccaacccaccatgttacaagacaatggatgaggatattgtgattcagcaggacgatgagatccgcttaaagattgtggggacccgtgtggacaagaatgacatttttgctattggctccctgatggacgattacttggggcttgtaagctgagcctggtggcctcctacccttggtcctactctaggaagtgtgattgtcacacttatcatgttgtccagaggtccagtctggctgctgttgtggaggcaaggaaggcaactcatcccagaaggcatctggtgcttcttgtagcttaactactgcctcctcatttttcagtatgtgttctaagtataaaaagtccttggttctcaaaaaaaaaaaaaaaaaaaaaacaaaaaaaccttgtgcgtggcgcgcggcctgggcgcccttggaaaaaacgtttcatcaaaaccaactgcgcgtggggcgagcgggggccccaggatgggtataggggacccgtgggcaaaaagcgggttccgataggggaaacccgggcgccaaagaaaacaggggcgggggggtttctcccccacccaagattaaaaaaaaagcggccggggggcgggaaaccacgaggggcggtcctgagaaaaacactctccagagagggagggcgcctgaggggggccaacaaaaaccgggagagcttatataaacaccgaggagagcgccccaacggcaaagagccccagatactaaaatttaaccgccgggcgctgtgggggtgatcaaacacaggaagcaaccagaacaaggctgaaaactagaaaagagaaagggagaggacaaaagctaaacagagcagagctatgaaaccgaacatcaagcgacatcaaaggaagaacacgcagaggaaatggaacgacaaaaaggagaagaagagaggagacagagaaagaagaaaagaagcgaaagagacaccaagaaaaacgagaagaacgcagaaggaagaaagagagaagagagggggaagagagagaggaggaggaagacagagaggaagagagaggatacaccgaacaaggagcaaacagagagaaagggaagaacagcagagaggaagaaaaagagaacagagacacggagaggaagaaacaagca

SEQ ID NO: 7762 - DNA, 3957 bp, Homo sapiens
  misc_feature (2161)..(2161): n is a, c, g, or t
tttcggacccatgtgaaggtccagagggagcatcataagacccagagccccgatttccaaagagtgatatgacatttatggagattggtgttgcacatattttgataaatactacgttattttttgggttttggtgtctcttgtcttaggacctggtagttatttgcttgattttttttccgttattttctacataggcaaagagaattcgagggatagacagtctccaagaaaagtgaagtggggggataagttttttttttttcttttttttcttttctctagtttttctttctggctgagatttccgtgcaagacagcacccaatagactatttagagttgacatttgacattttaatgggcgccatggctcattttgtagattgagaaggtgcgtctcccctgctccaagtctcatcatgacagcgtgctgacagctgggagtctgtggccttcctcacgcagaggccttaaagctggacacagatgcacgcctaggctgggcagggatgggacccatgccccctccttagaggacgggcttcctggttaggaaaggacacgtgggggtgccttgcataatagttcactggtcaccgtgcttttatgagtagtgtttttgtgcacttgccaggggttttctctctgtgtgcgaggggagtgatttaagcaatggtgtctggagtaagccttacaattttaatagactttttcttatcatatccctcatttctttccctgaaataaaaatacacacaagcaaaaaaaaaatgatagtttcacatctcttagttcccttgcccaaacaagaatattcttagttccactggccaggattttcctacatagtcagaacttacacattactagaggcacacccaccaaggagtattgtgtctacttttatctgtgcaccagccacaaatacccacattggaaagacccatttgtgatgggtaaacatcccttcctgtctcccacaacccctgtgactgccctgcatgtgttcatgacctccgaaggccctaattcatgaagcagcaaacccagcagatctccacccccctgcctcaggacctctgctgaagagggggatgaagtgggtctccagggaggcagtgggggccttgttggcagctggctcgggagccggcttacaggagggcagctctgcagttgggaggggcaccgtccggaggagaccaggcctctacacaccccccactctacttatcatccctgctcacacacccttgtccaaggctttatgcatcggatttatttttccaaatcaagaggacagtgatagatgcattttccccaggctgtctcagaaaggtcgctaaatgtatactgttgtcagaattgctgagatctccccccacttttggtttttgcagcagtaaaaactctttccactgtgacttattttctctctcaggcagccagccacctggtcccttgtgctgactctagcacagtggccaggatccaatacgagtccaggggtgaccgcaggatggtgggggcagcgggcttctccacctaccccagccaccaaggccctgacgcactgcctcctgcaccttcagcacatccctgtgcacagctggaagggtgcatggcccgctcacctttgttcagatgggtggaaacgctgatgataccagctcctccctgccgtgcccctgccacggagcaggcattgtgaactggctggtgtttgcagtcccacgtggcatggcctccagcccaacccacagtggagactggagacagggcaatgagtctggtcgggggcacgtggacatgccccataggggccccacccagacttaacaggcaaggtcctgggcattgcgcgacgcaggactcaatgctaaagcaagcctgcctggctctgtgccagggcccctcttctgatttacacatcccatttttacacagacccttccttcttaataaaggctgacagttctgttggcagccaagaacccacaccatgaagacagggagtgaggggcctttgtgcccaactccagcacagctgcgttctggggtgtgtgagaggcatgttcgtgtctgtgcgctggtggtctcgtgagacagttccgaggacggggaaattgcagggtggtgggggcgtgaggcttatatgngaactgatgcagaagttcgcctgcagacggatctggatatacactatgtataattgttacgtgtaatttaaaatatatctgtttgccatcgtcatgagaagattatatgtaaggctctgaagggagagggagatgtacattctgccaggctcctggggaccttatccgagtcatgaaattgatgactgttgatccagtggtgcaagaagctacactccatgtgtcatcacgcttatgactcctaatgtatttttaaggcaaaaaatgtcagccgactccatcttcacccctcgattcctcgagtccagcctttctgtgccagtgcttcactgagccacaacgctctcgccatcgggacccggctgggcctggagtctcggggcacagttgccatggagccctcctgggtcattctacaaatgtgctgagtgccagctgaaaaccccacaggagatggagtaccttggccaagcttaaagagaagattttctcagggtatttattagtgtgtccagcagggtcaggaagcaggatggaaagatgcattcagactgttaatttattaacaaggcaaatgattttgtgtttcttgatgacagactattaagtttgggacttattttcccatttgagaagttataatatatatttaagatgataagtttcctgcttaagttgtgcctttcagcttcaatgagtttaaggagcactaagggtaatgataccaatgagggttggtttattatcaaacctgaatagctgtggtttctccagtaaatattttcttctactgaacatggagccattattaagagttgtgtgttttttattatgtacatttgtatatttttttgcttgtttgatgttctatttttctaatagttttcttttagtttcttaaagttgtgatactagatttagattctgatgctaactgcaaatcaggttggtctctgctgggtctctcctgcttttattttactttaaggacaagtgtagttgtcgtccaccacctttcaaaaaatgtgaaactgccctgcctcccctttttgctgacaacactgtgtacattgaccacttcctaccatactttatgttgtaaaatcaaactcttttgtggtacattatctcatgcttctgcaaattcgaataaattctatggcttccaaaaaaaaaaaaaaaaaaaaaaaaaaaaaaaaaaaaaaaaaaaaaaaaaaaaaaaaaaaaaacaaaaaaacaaaagagaagagagagaaccagacaaaagaagaaaaaggcaacgcggaaaagagacaacaaaacaagaaggagaggagggggggggcggctgcgaaattcagcaagcaggggagcgagcacatcagcgtacgaccgtgtagagaggacgagagagacgcggaagagagaggctaaagctagaagcgagggggcgacgacacactagagagagacaaacacatgcacggacgaggtggagcgacacgaaaccccatcgctggaggatagcgaagcacagtccaacacaacacgacacagaagtcggacgagaaaaacagctcatggtggtggtgacccaccacaaccagcgaggcgagccaggagtcccgtcgcctatataaactcgcccccggatgacagaacaagggaagacagcaccagaacagctcgcgaaggaaccctcgaagacagcggcggacgcacacacacgaagacacgcgcacacacgctagcgaaggcgccagcagcatgcagcgaagcgagcacgcacgacgaagaggcacacctcgagccacacg

SEQ ID NO: 7763 - DNA, 1990 bp, Homo sapiens
atggggcggggcctctgggaggcgtggcctccggccggctcctctgctgttgccaagggaaactgccgcgaggaggcggaaggagcagaggaccggcagccggcgtcgaggcggggcgcgggaacgacggcggccatggcggcctcggggcccgggtgtcgcagctggtgcttgtgtcccgaggtgccatccgccaccttcttcactgcgctgctctcgctgctggtttccgggcctcgcctgttcctgctgcagcagcccctggcgccctcgggcctcacgctgaagtccgaggcccttcgcaactggcaagtttacaggctggtaacctacatctttgtctacgagaatcccatctccctgctctgcggcgctatcatcatctggcgctttgctggcaatttcgagagaaccgtgggcaccgtccgccactgcttcttcaccgtgatcttcgccatcttctccgctatcatcttcctgtcattcgaggctgtgtcatcactgtcaaagctgggggaagtggaggatgccagaggtttcaccccagtggcctttgccatgctgggagtcaccaccgtccgttctcggatgaggcgggccctggtgtttggcatggttgtgccctcagtcctggttccgtggctcctgctgggtgcctcgtggctcattccccagacctctttcctcagtaatgtctgcgggctgtccatcgggctggcctatggcctcacctactgctattccatcgacctctcagagcgagtggcgctgaagctcgatcagaccttccccttcagcctgatgaggaggatatccgtgttcaagtacgtctcagggtcttcagccgagaggagggcagcccagagccggaaactgaacccggtgcctggctcctaccccacacagagctgccaccctcacctgtccccaagccaccctgtgtcccagacgcagcacgccagtggtcagaagctggcctcctggccctcctgcacccccgggcacatgcccaccttgcctccgtaccagcctgcctccggcctgtgctatgtgcagaaccactttggtccaaaccccacctcctccagtgtctacccagcttctgcgggcacctccctgggcatccagccccccacgcctgtgaacagccctggcacggtgtattctggggccttgggcacaccaggggctgcaggctccaaggagtcctccagggtccccatgccctgagagaatttctagggaagtcatctcacttggccttctgaaggtcctccctaagagtctcctgacaaaagttacttattgaacacctctatgtgccaggctctgtgttgggtactttgatcaatgcccctgtttcagtctcatctgtactcacggcagccctgtggagtacggtgtactggcccagcttacagatgcagaaagcgagacgttctgccatcagataaagtcacgtggctctttagtaacacggacaaggctcctcgccaaggaactcgtggcagaagagggcagcagttggcagtagctgccgatgtctgtccccagctccaccattcctccctgtggctgtgccgtgctcgtggtttcagtgtccgtgtgtccatgtgtctgcccttcaggagctcgcagctggtgtgcttggcggtcccaggcctgtgtagtgtctctcccctgctgcgggcgcccccaccccgattcctctccccagaagcggtgggatgggcccccatgaactgcagcagcatgctgaggtgtccatgttgtctgcctttgtataaagaaacagcctctgaaaagaaaaaaaaaaaaagacgaaaaaaaaaaaaaaaaaaaaaaaaaaaaaaaaaaagcggaaaaaaggggctccagacacgggcacatgggcaaaagcaggttacctgacccccacttttcttggccaacgtggaaactccgccgggtcccaatatggagcccgaatattcgaaagccgggtacctgt

SEQ ID NO: 7764 - DNA, 1087 bp, Homo sapiens
atttgttattttcccatctctcttaaaaaagtctttatgattattctatatagttttgagaactttaaagccacttttttttacccttacatttgcataaaaatgtttagcttttaagtagagagcaaattatgatcatatattttgatattcatgacctgtttgactataggagtttttttaaaaaaaatgcactttggctataaaaccatggatgatttgatccataagatttaaatgtgccaccattatagtattcctagacatgagcttgatgaatggtattctgtaattataacgtgccacacattattgtgtcttaattgcccttagcctgaattttaatgatcaatttgttattgttgcagatgtgaatattgtgcataaacttactaaatttatgtaaaattgtataaaatagaattagaagtcactaagttctttctgtgtagaagtaataaatttattgtaacacaatgcagttgtgtatatgacattctgtaattccttgaactggatcatatattcataagttctgtagatacttatgcatgaacattttctcatttagttcttgggttcattatttgtattgtgtttactacttgtgatcatgtagttgtgccttactttgtgagaaaggttagctcagtaaatactgcaatttctaaactcagtgattggaaggttattaattataaatgtaactgataaagtacgtgacagcatttaaatctgtataaagaacaatggaaggatccttattgaattgttgcttttttttaatatgtttaaatattatattaaaaacatttctttctaaacaaaaaaaaaaaaaaaaaaaaaaacaattgtgggcctaggccctgagagaagttgatgaacacaagtagttgaggcgccgcgcgcccagatggcaactgagaaaggtgccaaagggggctccgagagagacgcgcgcaacaaaaggggtgaggactccaccaaaaaaaagccccgcgagacacagagcttttagaaaacatccaaaggagcatgacaagcacagaggagacacacaaaggaggtcacagagagcgagataatc

SEQ ID NO: 7765 - DNA, 5040 bp, Homo sapiens
  misc_feature (1757)..(1771): n is a, c, g, or t
  misc_feature (2430)..(2473): n is a, c, g, or t
ggctgtacggccgagattatgtatccgccgtggagccggtgtgtggggtgcaggcgtaaggggagggctgcggtttgaaaggggcgagcccctctcgtcccgggactgggaagatcggccaccggcgccgggcgaggcggcagggcgaggcagtgccatgctgcctttgtgcaaagttgggcggcgggcggcgcgccgcgcgcaggggccccgcacacccgcgaccgcgcgcagccgtggctgctgctgagtggcgggggcccccccgctccccccggcccttgaaggcggagagagctcgcgtctcgctcggcttcagggtaagtccagctgtgagcagagtgttctgttcttcacttccagcaagccagagtttcataaatggacgctgacatggactacgaaagacccaacgttgaaactatcaaatgtgtggtcgtgggtgacaatgccgtggggaagacgcgcttgatctgtgccagggcgtgcaacaccacactcacgcagtatcagctgctggccacccacgtgccaacagtgtgggcgattgaccagtaccgcgtgtgccaggaggtcttggagcgttctcgggatgttgttgatgaagtgagtgtttctctcaggctttgggatacttttggtgatcatcacaaagacagacgctttgcatatggcaggtctgatgttgtggtcctctgtttttcgattgctaatcccaattccctaaatcatgtgaaaagcatgtggtatccagaaatcaagcacttttgccctcgaacacccgttatccttgttgggtgccagcttgatctccgctatgccgacctggaagctgttaatcgagccaggcgcccgttagcaaggcccataaagagaggggatattttgcccccagaaaaaggccgagaggtagcaaaggaacttggcttaccatactatgaaacaagcgtgtttgaccagtttggtatcaaggatgtgtttgacaatgcaatccgagcagcgctgatttcccgcaggcacctgcaattctggaaatcccacctaaagaaagtccagaaacctttacttcaggcacccttcctacctccaaaagcccctccaccggtcatcaaaattccagagtgtccttccatggggacaaatgaagctgcctgtttactggacaatcctctatgtgccgatgttctgttcatccttcaggaccaggaacacatctttgcacatcgaatttacctcgctacctcttcttccaaattttatgatctgtttttaatggaatgtgaagaatccccaaatgggagtgaaggagcctgtgagaaagagaagcagagcagagatttccaggggcggatattgagtgtcgacccagaggaagaaagggaggagggcccgcctaggattcctcaggccgaccagtggaagtcttcaaacaagagcctggtggaggctctggggctggaagccgagggtgcagttcctgagacacagactttgaccggatggagtaaggggttcattggcatgcacagggaaatgcaagtcaaccccatttcaaagcggatggggcccatgactgtggtcaggatggacgcttcagtccagccaggcccttttcggaccctgctccagtttctttatacgggacaactggatgaaaaggaaaaggatttggtgggcctggctcagatcgcagaggtcctcgagatgttcgatttgaggatgatggtggaaaacatcatgaacaaggaagccttcannnnnnnnnnnnnnncgaaagcctttcacgtaaggaaagccaatcggataaaagagtgtctcagcaagggaacgttctcggacgtgacatttaaattggacgatggagccatcagtgcccacaagccgctgctgatctgtagctgtgagtggatggcagccatgttcggggggtcatttgtggaaagtgccaacagtgaggtgtatctcccgaacataaacaagatatcaatgcaagcagtattggattatctctataccaagcagttgtctcctaacttggatctggacccgctggaattaattgccttggcaaacagattttgcctgccacacttggttgcacttgcagaacagcatgccgttcaggagttgaccaaagccgccacgagtggcgtgggcattgacggagaagtgctctcttacttggaattggctcagtttcacaatgcccaccagttggccgcctggtgtttgcaccacatctgcaccaactacaacagtgtatgctccaagttccgtaaggaaatcaaatcaaaatctgcagacaaccaggaatacttcgagcggcaccgctggccccctgtgtggtacctgaaggaagaagatcactaccagcgtgtgaaaagggaacgagagaaggaagatattgcactaaataagcatcgctcaagnnnnnnnnnnnnnnnnnnnnnnnnnnnnnnnnnnnnnnnnnnnnaagaggaagagaaaaaaaacaaaaaacagaaaccaatcggtaatctgatccaccacttttcaaagcactactataaaattcgtcttgttagagatacgacatagttcaggtttcgggcactgatcttcctccacttttgtgcatttatctttgttaggatcaaagcacaagctcaccatcaatgagcctggacaaaaagggaagctgactctcactgcattccttaaactgatatgtatattttttttgttaggaggcttaataaactttagtctgttattttgtttctttttatacaaagaaaaaaaattcagctttcatgtttctgattccagattggaaaatatttttatatggtctgttgtattttgttgaaatgaaaatactgtgtattactttattttacaggccacaattgattatgaagtcaccctgtgattctctttgcccacatgaccaccgagcattattacgtaattagagggttatccttttgttgtgaaaggaaggaggggactgaaatctcccaaagtgcaaattggagagtgtttaatctttgttctgttgaataacatcggtgtaattacaaagtcaactccaagaatgtgtatttacaatatttgccatgttaagtgctggtaattatatggttatatgtgccatgtaaaatatagtgatatcaaatattctgttgtttccaatgtctagtttcaagaggacaatctttataatcattagaagggcttattaaatcccagcattatccagggcaaactcactggtggacctgaatacataagataccattagtgcgctggtgttcggattgctgtattagggtttacatctctcagtattccttgaacttgccatgcttctgctgtggatttttcgttgacttgaattgagatgggcaagggaaaaggtccctggactccctcctgccatctacaggcttgtcacatctcaccaccagaaacaggcttcctcaggcttctcacctgtggccaacttcactttgtaagacccatatttttaactcttcccagggaaaattcatgttgctgcagaagtaggctaaggcagaccacccacttctgctgaaatgcattgggagcctgtgaaagcacaaagctggaggctgggcgcctgcgttctcctacacggaaaggaatctaattccaagagtctaggaaatggtgctattgtgagttcgttctgactctttctcattctgagttttcagtgttaaactaggaagtgtgacagcaggggagctttcgtgaggcagtcagtcattgcttctctgtaaattaaaatgttacagcacacacatacacacacagagagcatttcaaggccacagctccacacctgccatgggatgttaatgtggcagggggtggggctcattctgttgggaggtcaaattaccaatgccaaggactgttgattttgtttttatttttattttttcttctagcttttcagaagatggaaatgagacagttgagttcaaaccccaatgctgacagccatatgcatttgaaaatctatctagattacagatgggcatttattactggcagtggaaacaccagatagaagatcttaggagaggcccagaaatgcatcaccttgtcatgacaaaagagaaggcagtagagtagggatagttacaaatgcatccatcttaattattttcaataggcttgtaaatcttatcgatggaaggagaaaggagacaagatgtggaagaattgacatgtatcccaccataaaatggtagaagatgagttttcaatgagtagtcatagttgaaattttacaaccaaagctcccatttgattgtaatcttgccaaaatataatggatgtataaatgaacttggggtataagcaataatatccactagtgttgttatcagctactgtaaccaagtggctggttcatttggttgatgctgattatggcctttaaccatggtggtttgttgtgtgttttttatttcacaaaaagccaataaaattgtttagctataaaaaaaaaaaaaaaaaaaacacaacaaaacaacaaaaaccaaaaaacaagaaaaaaaaaaagaacaacaagaaaaaaaagggaggaggggcggcacatcaagagccccacaagaggagacacgagcatgcgaacgcacacaccgactttatggacacacaaggtcgcccccataggaaggcccagcatatcaaacgcactacgacgcagcgaccgcgatagaaaaaagacaaagcacaggcagagaccaaacgtgcagaagacagagaaacatgaaggaaacagaagacaaccacaaccagtggggggaggacacaaacacaccagtcgggcaaaacaaaaccccccacgacgaagatgcacgcagaacgcaccgcgaagaagaggacgacataaaacactaccccagacgacgacgcaccggggggcacagcaaaaacacgcagacaataaacggcggagcaaaaagaaaaaagtgatgacagcgaagacgagacgaaagcgacgcacacaaaaactatacaagg

SEQ ID NO: 7766 - DNA, 733 bp, Homo sapiens
ccatggaaaatatttattgagcacaattatgtgagagcatcatgctgagctttgaagatacagtggtgagcaaacatatatcctggcttcatgaagattatactctagttaacatgagcaacaaaataaaataatcacacaaaatatataggttcaagctgaaatgagtggctgcaccagattctatgagataagaaaggaagaaggacatttttcaccaagttcaaagactgggatacaaaggaatttttcctgacaaaggcaaaacaaaaacaacaacaaacaaaaaacccaaaagagcaaaatgacagtagaacataacggggccagatcaaaaatgctgacaggttcccaaaagattaaaatgacggtaggacatgacggggccagatccaaaatgctgacaggttcaaacaaaattggaattgaaaatcagagtgcgttcaagagtatcaaacaatactatcttgttacttgcttattaccttagtagactggaagcaacacttcacacaaaaaaagggtttggatgtaatttcggataagaagagatgtttctgtaaagtctttcctgagaagcatattatttgagaaaaacacatatttctgtttttagtatttcactttgtataatgtcttaatttttgaagagctggtatattcctatgattcattaatgaaagttctataagatataaaatatacaatgaggagatctcctcttctgtatcag

SEQ ID NO: 7767 - DNA, 1999 bp, Homo sapiens
  misc_feature (99)..(222): n is a, c, g, or t
gagcacgcagtcccttggtctcttcggtctcctgccgcccccgggaagcgcgctgcgctgccgaggcgagctaagcgcccgctcgccatggggagcccnnnnnnnnnnnnnnnnnnnnnnnnnnnnnnnnnnnnnnnnnnnnnnnnnnnnnnnnnnnnnnnnnnnnnnnnnnnnnnnnnnnnnnnnnnnnnnnnnnnnnnnnnnnnnnnnnnnnnnnnnnnntattcacaccctagatataaagataccccgtggtgctcccccatcaaggtgaagtatggggatgtgtactgcagggcccctcaaggaggatactacaaaacagccctgggaaccaggtgcgacattcgctgccagaagggctacgagctgcatggctcttccctactgatctgccagtcaaacaaacgatggtctgacaaggtcatctgcaaacaaaagcgatgtcctacccttgccatgccagcaaatggagggtttaagtgtgtagatggtgcctactttaactcccggtgtgagtattattgttcaccaggatacacgttgaaaggggagcggaccgtcacatgtatggacaacaaggcctggagcggccggccagcctcctgtgtggatatggaacctcctagaatcaagtgcccaagtgtgaaggaacgcattgcagaacccaacaaactgacagtccgggtgtcctgggagacacccgaaggaagagacacagcagatggaattcttactgatgtcattctaaaaggcctccccccaggctccaactttccagaaggagaccacaagatccagtacacagtctatgacagagctgagaataagggcacttgcaaatttcgagttaaagtaagagtcaaacgctgtggcaaactcaatgccccagagaatggttacatgaagtgctccagcgacggtgataattatggagccacctgtgagttctcctgcatcggcggctatgagctccagggtagccctgcccgagtatgtcaatccaacctggcttggtctggcacggagcccacctgtgcagccatgaacgtcaatgtgggtgtcagaacggcagctgcacttctggatcagttttatgagaaaaggagactcctcattgtgtccacacccacagcccgaaacctcctttaccggctccagctaggaatgctgcagcaagcacagtgtggccttgatcttcgacacatcaccgtggtggagctggtgggtgtgttcccgactctcattggcaggataggagcaaagattatgcctccagccctagcgctgcagctcaggctgttgctgcgaatcccactctactccttcagtatggtgctagtggataagcatggcatggacaaagagcgctatgtctccctggtgatgcctgtggccctgttcaacctgattgacacttttcccttgagaaaagaagagatggtcctacaagccgaaatgagccagacctgtaacacctgacatgatggttcctctcttggcaattcctcttcattgtctacatagtgacatgcacacgggaaagccttaaaaatatccttgatgtacagattttatttgtaattttaaaagtctattttattatgagctttctttgcacttaaaaattagcatgctgctttttgtacttggaagtgtttcaaaaaattatatgaccatatttactctttctaactttctttactccatcatggctggttgattttgtagagaaattagaacccataaccatacacaggctatcaacatgttattcaatgtgacacctaactcttttctattttgttttttaagtaagacttttattaataaaacaaaatgttttggagcaaaaaaaaaaaaaaaaaaaaaaaaaaaaaaaaaaaaaaaaaaaaaaaaaaaaaaaaaaaaaaaaaaaaaaaaaaaaaaaaaaaaaaaaaaaaaaaaaaaaaaaaaaaaaaaaaaaaaaaaaaaaaaaaaaaaaaaaaaaaaaaaaaaa

SEQ ID NO: 7768 - DNA, 5273 bp, Homo sapiens
  misc_feature (600)..(624): n is a, c, g, or t
  misc_feature (1391)..(1407): n is a, c, g, or t
ctcccaagttgctgggactacaggcacgcaccaccaggcccggccaggtatttactttttgttgaattttaagggacctcaagtgaaataataatcggtgaattcaggatcaacctttatgtccagagcgtttgttccgtcgtccatttcttgtctagagtagtggtatgagctgaaaacattgctaagtgatcaccacatattgttgatgtaagggctactggttattacaagagatttttatgactcctgctgtgggggtgccctttctacccggctgagcttggtgggagccaaggctgagtcggatgtatctttatattcccagttctcggtggaacttaaaatgctgtgagacaccagacagacagatactgtgaacttggagctctctaatgaagggataccaaagtcttgtattcaatttttttttccttaaattgtcagccgaaaatgagagcacacctattcagcaactcctggatcacttcctccgccagcttcagagaaaagatccccatggattttttgcttttcctgtcacggatgcaattgctcctggatattcaatgataataaaacatcccatggattttggcnnnnnnnnnnnnnnnnnnnnnnnnnatgaatacaagtcagttacggaatttaaggcagatttcaagctgatgtgtgataatgcaatgacatacaataggccagataccgtgtactacaagttggcgaagaagatccttcacgcaggctttaagatgatgagcaaacaggcagctcttttgggcaatgaagatacagctgttgaggaacctgtccctgaagttgtaccagtacaagtagaaactgccaagaaatccaaaaagccgagtagagaagttatcagctgcatgtttgagcctgaagggaatgcctgcagcttgacggacagtaccgcagaggagcacgtgctggcgctggtggagcacgcagctgacgaagctcgggacaggatcaaccggttcctcccaggcggcaaggtagtgctctgtggccaccgagagagggtgccacgtggccccagactctctgtgtgcctctccttctgggttggtgctgtgtgatctagcacagccaccgggatccagaggtcagcgtggggccctgacgggaggtccggatcagacacacataaggctggtctcttcagtcggggtccaggtgcctctggcagggctgccgctggtgtttcatgcatcgtggaggccacgtggtcactgacctcatttccttgatggaggccctgctgcaggctaatcctttctcttggagtgaatgctgacttctgtgtctctgtcactgggtgttgacgtgaggcaccgcccttgttattccagtgggggtgctggtgttggatnnnnnnnnnnnnnnnnnataggccaccgactgtgttcacgtggctcctgccacagatggtctttgtggtggtggggcccactcagctgaccacgctctcctttctggcaggagacgttctagacccagtgtcttcagtggaaacagagcacaggctgtctgcagtctcaggcttcctagcagccctgataagagaagtagagcaatgcaggtgacattaatccttgcaggtttcatttcacctctatatccaacattttatctcaacatgtagtctgtagaaaacgttaatttgagctttatgggtttttttcatattaagtcttcaaaatgcacatgggatgggatgtaaagaacgctgaagtgggggcatttcagaggtgtctgctgctttttgcctgtgcctgctgggaagttgcagtgctctgtgtggcttgcgtgttgcgaggttgcggtctgcgtggctcacgtgttgggaggtcgtggtctgcgtggctcacgtgttgggaagttgcagtggtctgtatggcttgcgtgttgggaggttgcagtctgtgtggcccgtgtgttgggaggttgtggtctgcgtggcttgtgtgttgggaggttgtggtttttgtggcttgcgtgttggggggttgtggtctgtgtggctcacgtgttgggaggttgtggtctgcgtggctcacgtgttgggcagttgtctgcttggctcacgtgttgggaagttgtggtctgcgtggctcatgtgttgggaagttgtttatgtggcttgtgtgctggaggttgtggcctgcgtggctcacgtgttgggcggttgtctgcttggctcatgtgttgggaagttgtggtctgcgtggcttgtgtgttgggaagttgtttatgtggcttgtgtgctggaggttgtggtctacgtggcttgcactgtagttcttttggacagccttgctctgcagtctgtgtttcagccctggaattgccacattctccaagaagccctggtttcttgactagagagccttgtgtagaagccaggacctgggttctgggtgaagccctctgcagatagagctgggagatgcctgttgtgtgtgtctgcaccacatacatggacactgtgcagagggattctgttggcacctgtgtttacatgggttgaaaactgtttttacacggaaacttccagttccctcgtgccccgtgggttccgcccacttcttccctttcagttttgtatctgcgccgtgaggacttgtctcctaatcttcgtatcaactccgtgtcccattgagctgaccttccgcctctcccccagggccctggccatcctgtgggctctgagactttgcatggatccgcggtggggagctgcccccacacaaacgtccggctcttctcaggccaggtggctgccctgacatggcatgatgtccagcgcatggacgtcacccttgcactggagcccagccaaccgctgcatgacagccctcttcccccttgaaccccaagtctgcacacaccagtgcctcctcttcctggatcctcctgatggcctgtacacagaactggggtgtgggtggtgggtttttaaatgaaaaccagtccacacatgcttgagggctggagccgcctgccgtcagggcagtgccatgctgacctgctgaccgttccattttgtcaaggctcatgagcaattttaaatgtttactcgtgggtgaaggtttttgtttcagctgtaccccctatagcagggccatggggagcctaagaggttctccttggcacctgtgcgcgctctgctgttgccggtgagtctgaaattccagggaatgccgtgaggggccctctggcgtttgttcttggacaaatgtgctttcacccccattaagccctgcttgttggtcttcatttcatttgtgctgcgctgcccctcctgagggacagacgctcaggcagtgcttccttccagatgggctatctgaagaggaacggggacgggagcctgctctacagcgtggtcaacacggccgagccggacgctgatgaggaggagacccacccggtggacttgagctcgctctccagtaagctactcccaggcttcaccacgctgggcttcaaagacgagagaagaaacaaagtcacctttctctccagtgccactactgcgctttcgatgcagaataattcagtatttggcgacttgaagtcggacgagatggagctgctctactcagcctacggagatgagacaggcgtgcagtgtgcgctgagcctgcaggagtttgtgaaggatgctgggagctacagcaagaaagtggtggacgacctcctggaccagatcacaggcggagaccactctaggacgctcttccagctgaagcagagaagaaatgttcccatgaagcctccagatgaagccaaggttggggacaccctaggagacagcagcagctctgttctggagttcatgtcgatgaagtcctatcccgacgtttctgtggatatctccatgctcagctctctggggaaggtgaagaaggagctggaccctgacgacagccatttgaacttggatgagacgacgaagctcctgcaggacctgcacgaagcacaggcggagcgcggcggctctcggccgtcgtccaacctcagctccctgtccaacgcctccgagagggaccagcaccacctgggaagcccttctcgcctgagtgtcggggagcagccagacgtcacccacgacccctatgagtttcttcagtctccagagcctgcggcctctgccaagacctaactctagaccaccttcagctcttttattttatttttttagttttattttgcacgtgtagagtttttgtcatcagacaaggactttgatcctgtcccctttggcatgcgggaagcagccgcggggaggtaatgaattgtctgtggtatcatgtcagcagagtctccaagccccacgaaccctgaggagtggagtcatacgcgaaggccatatggccatcgtgtcagcagagagagtctctgtacacagccccgtgaaccctgaggagtggagtcatacacgaagggcgtgtggccatcgtgtcagcagagagagtctctgtacacagccccgtgaaccctgaggagtggagtcatacgcgaagggtgtgtggccaggctgcagagctgcgtgccgtttgtgtccgagcatcacgtgtggctccagcccttgtttctgccagtgtagacacctctgtctgccccactgtcctggggtcgctcttgggaggcacaggcatgggtgtgtctggcctcattctgtatcagtccagtgtgttcctgtcatagtttgtgtctcccaggcaggccatggtaggggcctcgcaggggccattggggagcacagggccaggctggggtgaggagagctcccctgttttctgtttaattgatgagcctgggaaaggagtgtgttctgcctgcccgttacagtggagcgttccgtgtccataaaacgttttctaactgggaaaaaaaaaaaaaaaaaaaacaaaaaatataaaaaaaataccataaacacagcttccagtcacgagacacagagagccaaagtgcactctaactgctcccaggcaggctgaggggtgcctgtgtccttaccaagctggtggtggtcctctgagcccaggctgtcgtgccagcgggtgacatcagggtgcgcctgttgcggccaccagcatctcttgcagggttgcctgggtctgtgaccatggaagttgagtgtgccgaagccatcccccagaggcaggctggttggagccagtcgtccgggggggcggttgtgatctcaagcccgggcgttgcgggcgggcccaccgggccggggtgcc

SEQ ID NO: 7769 - DNA, 6820 bp, Homo sapiens
  misc_feature (541)..(559): n is a, c, g, or t
  misc_feature (1697)..(1712): n is a, c, g, or t
  misc_feature (3832)..(3846): n is a, c, g, or t
ataaaatattgcatattgacagcaatatcccagtggctgatttattgataatatctttgaccatttgaattttttttcctattatatataaggaaatacaaactaggtaacaggaagaaatgagaaaaggtagagagagacaatagtgaagactggtggacattggactacaaaagattactgcaggattcttctatgatgctgattacagctttatcttatcaagctttggcattgaagaccatgtgaattcatctccaaccctgggagtgaaataagaactttcttttttgcttctgaaattttaagctctatacggaaacactttttacttaatctgcatgacatcagagaaagggaacaatttgaccaaagaaagaagaaaaagtggattagcagatctcatggactgagagtctccagatggtaggaggtccattcagcagaaatacaaatgagaatacgatgtttctaatgtatttaatttggagaaaaacattttcacattttttcaataagcaaagttaatcacattacattnnnnnnnnnnnnnnnnnnnattaattaaattgattatgctcacactagagaacaatataacatatcatagtcaaataacgtttatgtttatattcattattacaagcattaaaaagaaataaatagtgttggcagatattacttaagcaggcagagtctcctatatctggaaatttatcatttatactgctagagttaaggatattttaatagtatttaattaactaaaatttaagagattactgctttcagccctttaaaaattattaattgaacattgactacctgcttggtctgtgtttaccattatccattaagagcttgttatttaattggggaaatccaggtcaagatacagtaaatacacaagaaacttatcaaatatttgaataaaaataatggcacccatattttatggtgtatttatagtattgttcctgaaaaaataagaaaaactattaatatccccctccaaaaacacatggaagaaatttcccatttttaaaaattattaatattctcatctaataaatgctatttggaactatcatattggaaataaataaaatacctttaatccaataatgatatcattgaagaaatgagtaccctcatatagttacagtgctattataaataactaaaatttctggaggtatttgttttacatataccagaaagtcttaaaattttacattccagttaaaacatatattcaatatttagtaattcatgctaaattatcataaatatttccaaagatgtcgataaaataagcctcactgaaaatatatttatataaaatattgaacaagtaaaatgttcatatccacattacaaactgatatgaggaaattctattctgtccaaaaatgatacagaatacgtaaagacatgcaaaatgattataacataataaaacataaattagatgatttttaaaatctctaagttcagtaaaaatccagagaaatcaaactgaatgtggataaaggcaccaaaaagtggaatgaataaagtcacgtacatcggactgtgaagaaaaatcatgttttggaaaagctgtccacacaatacaagaatttttaatcgaagaaaaattcactggcaaagaagccactactgcctctaaaataagaccacaaggcaaacacccnnnnnnnnnnnnnnnnccaactaggaaactagcagaagctctaccactgcccacagcaaagattcaaaattgggcaacctgtggacttggcatctgactggtgcggcaaggaaggaggctggtaggtaagcgctactgtgcccaaccccgagctgcctcttcgcagtcttcaggagcaagtcccccattccagctcctctggcagagtatggagttacctgcgtccggggcaggaaaccatgaatgtgcccttctgccctcttgcctttctgccactctttgagttcccgtccttaattgaagagccagtgactattggctgaagttcccccagcgatttgcatgaaccgagagggagtgtcttctgccgccctcccttcaagagcgctctgactgcagcctcccagggaatgcgcggccgagggaatgcgcgcagctcacaggccctgggagtgagctggtgcccggcgacctggcacccgcgcctggatatggggcgtctacatcgtcccaggagcagcaccagctacaggaacctgccgcatctgtttctgtttttcctcttcgtgggacccttcagctgcctcgggagttacagccgggccaccgagcttctgtacagcctaaacgagggactacccgcgggggtgctcatcggcagcctggccgaggacctgcggctgctgcccaggtctgcagggaggccggacccgcagtcgcagctgccagagcgcaccggtgctgagtggaacccccctctctccttcagcctggcctcccggggactgagtggccagtacgtgaccctagacaaccgctctggggagctgcacacttcagctcaggagatcgacagggaggccctgtgtgttgaagggggtggagggactgcgtggagcggcagcgtttccatctcctcctctccttctgactcttgtcttttgctgctggatgtgcttgtcctgcctcaggaatacttcaggtttgtgaaggtgaagatcgccatcagagacatcaatgacaacgccccgcagttccctgtttcccagatctcggtgtgggtcccggaaaatgcacctgtaaacacccgactggccatagagcatcctgctgtggacccagatgttggcattaatggggttcagacctatcgcttactggactaccatggtatgttcaccctggacgtggaggagaatgagaatggggagcgcaccccctacctaattgtcatgggtgctttggacagggaaacccaggaccagtatgtgagcatcatcatagctgaggatggtgggtctccaccacttttgggcagtgccactctcaccattggcatcagtgacattaatgacaattgccctctcttcacagactcacaaatcaatgtcactgtgtatgggaatgctacagtgggcaccccaattgcagctgtccaggctgtggataaagacttggggaccaatgctcaaattacttattcttacagtcagaaagttccacaagcatctaaggatttatttcacctggatgaaaacactggagtcattaaacttttcagtaagattggaggaagtgttctggagtcccacaagctcaccatccttgctaatggaccaggctgcatccctgctgtaatcactgctcttgtgtccattattaaagttattttcagaccccctgaaattgtccctcgttacatagcaaacgagatagatggtgttgtttatctgaaagaactggaacccgttaacactcccattgcgtttttcaccataagagatccagaaggtaaatacaaggttaactgctacctggatggtgaagggccgtttaggttatcaccttacaaaccatacaataatgaatatttactagagaccacaaaacctatggactatgagctacagcagttctatgaagtagctgtggtggcttggaactctgagggatttcatgtcaaaagggtcattaaagtgcaacttttagatgacaatgataatgctccaattttccttcaacccttaatagaactaaccatcgaagagaacaactcacccaatgcctttttgactaagctgtatgctacagatgccgacagcgaggagagaggccaagtttcatattttctgggannnnnnnnnnnnnnntatttttccttagacagtgtcacaggaattctgacagtttctactcagctggaccgagaagagaaagaaaagtacagatacactgtcagagctgttgactgtgggaagccacccagagaatcagtagccactgtggccctcacagtgttggataaaaatgacaacagtcctcggtttatcaacaaggacttcagcttttttgtgcctgaaaactttccaggctatggtgagattggagtaattagtgtaacagatgctgacgctggacgaaatggatgggtcgccctctctgtggtgaaccagagtgatatttttgtcatagatacaggaaagggtatgctgagggctaaagtctctttggacagagagcagcaaagctcctatactttgtgggttgaagctgttgatgggggtgagcctgccctctcctctacagcaaaaatcacaattctccttctagatatcaatgacaaccctcctcttgttttgtttcctcagtctaatatgtcttatctgttagtactgccttctactctgccaggctccccggttacagaagtctatgctgtcgacaaagacacaggcatgaatgctgtcatagcttacagcatcatagggagaagaggtcctaggcctgagtccttcaggattgaccctaaaactggcaacattactttggaagaggcattgctgcagacagattatgggctccatcgcttactggtgaaagtgagtgatcatggttatcccgagcctctccactccacagtcatggtgaacctatttgtcaatgacactgtcagtaatgagagttacattgagagtcttttaagaaaagaaccagagattaatatagaggagaaagaaccacaaatctcaatagaaccgactcataggaaggtagaatctgtgtcttgtatgcccaccttagtagctctgtctgtaataagcttgggttccatcacactggtcacagggatgggcatatacatctgtttaaggaaaggggaaaagcatcccagggaagatgaaaatttggaagtacagattccactgaaaggaaaaattgacttgcatatgcgagagagaaagccaatggatatttctaatatttgatatttcatggtggaataacacagagaaatgttttaactgactttggatcttcatcacctaaaaaagagtgtgttgatggcagttccaatgaaggacaactaatttataacttgttctatattgtaaatagctgtttacaggtttttaaatttaaattcagaggttataaaatgtgtacagcatttttaagtgaaaattagtactaacagctataggacttgtatttaaaaaaaaaaaaaaaaaaagcttggacatggtttgcagctttcatacaccaagcagatgattgataaaacctgggagtaaggtaagaaaaatggaacaaatttttatctaaaaattcctgtcaccacaagagggcatcagctgctcctttgcaggaaactggggtattgtacttggcagttgtacatgaaattaatgaaagagtatattttaaatatattgtttttaacattaaacaaatatgaaattaaagtaaattaaatttcaccctatttaaacatatgataaaaaaagaaatgcacttgtaaacagaatgtttattacctcataagtgcatatatagtttgaaagagaaggcattaaaaagaagtgcgattcctttttagcaaggataaaatcattgccttgtgttacagattcagcctgctgaagagtattccactttctgtgtactcgaattgctttctgtttgctttaccactgcacttgttattattacaagggaaatagatatatacatacatatatatattcttcattacaggaaatgtaactagatattgtgcccaagaaaaacagccagaagcaaagaaatgcttcaatctttagttgcttcataggcattcatgacattttagtgctttcacaacttgttggtcgtactttatacttgggttatatattagacttttataggcttgaaatcatccatcacataagaaaatagaaatcatattaaaagtgaattcttctagaggcttgtgtacactactggttgttttagttgggccttttatatgaaagttatactgtacttatctttttgttgttgtttaggtttgttgactaccatttctggcttcctttctttggttttggattaaatccaacagtttatttgtaagccctgcagcagatttctttgataatttagcttttactgaatctcttgcaatgaagaaagctatttcatcagtgatttatcactttcaattcattgtgtgagctggaaatattattttatatgagagctatagcaaaataatctgtataaacaaggaatgtgttagcttaaactggatcattttactttttggcatcatgcatctgtactgtaccaaaagtgtttatatgtctgcaaattaaaggtatatattttcataatttctttctcacttttagcattttatatttgaacatgggcttgttatttcactgaagtgcctgtcatttgtttgtttttagggttaaatgtgggtaacctgtagtattctgctatactaaagtttatattaaatgaattcattactcaattaaacattgggtaaattattaaaaaaatgtgtaattatagacctatatatagtagaaaagagagtatggcctaaatgtttgatgtaagttcatatgaaaaatttgcacccatgtatggggccatgggatattaattttattataagattttaatatcctttataaaatttttcctttttcctaccggaatttattaacaaaatccctccggtttagctggggtttgccaataaccttggccaataaattttttaaaaaccaaaaattaccttctccacaaaaaagaaactttggaatggccaaacccacccaaagttct

SEQ ID NO: 7770 - DNA, 5426 bp, Homo sapiens
  misc_feature (2272)..(2319): n is a, c, g, or t
ggagttgggaggctcccggcgcggggtcccgggctcgtgtccccgcctttgtgtctggagctcgggcgcgggaggcgctggggacggcgcccgggcggagcggctgagcgggctgcagccggggtcccgccacctctccctggtgaagcggcgggcggggtggagcagccagctgggtccggggagcgccgccgccgcctcgatggggtgttgaaaagtctcctctagagctttggaaggctgaatgcactaaacatgaagagcttgaaagcgaagttcaggaagagtgacaccaatgagtggaacaagaatgatgaccggctactgcaggccgtggagaatggagatgcggagaaggtggcctcactgctcggcaagaagggggccagtgccaccaaacacgacagtgagggcaagaccgctttccatcttgctgctgcaaaaggacacgtggaatgcctcagggtcatgattacacatggtgtggatgtgacagcccaagatactaccggacacagcgccttacatctcgcagccaagaacagccaccatgaatgcatcaggaggctgcttcagtctaaatgcccagccgaaagtgtcgacagctctgggaaaacagctttacattatgcagcggctcagggctgccttcaagctgtgcagattctctgcgaacacaagagccccataaacctcaaagatttggatgggaatataccgctgcttcttgctgtacaaaatggtcacagtgagatctgtcactttctcctggatcatggagcagatgtcaattccaggaacaaaagtggaagaactgctctcatgctggcctgtgagattggcagctctaacgctgtggaagccttaattaaaaagggtgcagacctaaaccttgtagattctcttggatacaatgccttacattattccaaactctcagaaaatgcaggaattcaaagccttctattatcaaaaatctctcaggatgctgatttaaagaccccaacaaaaccaaagcagcatgaccaagtctctaaaataagctcagaaagaagtggaactccaaaaacacgcaaagctccaccacctcctatcagtcctacccagttgagtgatgtctcttccccaagatcaataacttcgactccactatcgggaaaggaatcggtattttttgctgaaccacccttcaaggctgagatcagttctatacgagaaaacaaagacagactaagtgacagtactacaggtgctgatagcttattggatataagttctgaagctgaccaacaagatcttctctctctattgcaagcaaaagttgcttcccttaccttacacaataaggagttacaagataaattacaggccaaatcacccaaggaggcggaagcagacctaagctttgactcataccattccacccaaactgacttgggcccatccctgggaaaacctggtgaaacctctcccccagactccaaatcatctccatctgtcttaatacattctttaggtaaatccactactgacaatgatgtcagaattcagcaactgcaagagattttgcaagatctacagaagagattagagagctctgaagcagagagaaaacagctacaggtcgaactccaatcccgaagggcagaactggtatgcttaaacaacactgagatttcagagaacagctctgacctcagccagaaacttaaagaaactcagagcaaatacgaggaggctatgaaagaagtccttagtgtgcagaagcagatgaaactcggtcttgtctcacctgaaagcatggataattattcacatttccacgagctgagggtcacggaagaggaaataaatgtgctaaagcaggatctgcagaatgcattagaagaaagtgaaagaaataaagagaaagtgagagagttagaggaaaaactggtagagagggagaaaggtacagtgattaagccacctgtggaagagtacgaggaaatgaaaagttcatattgctctgttattgagaatatgaataaggagaaagcatttttgtttgagaaataccaagaagcccaagaagaaatcatgaaattaaaagacacactaaaaagtcagatgacacaggaagccagtgatgaagctgaggacatgaaagaagccatgaataggatgatagatgaactcaataaacaggtgagcgagctgtcacagctgtacaaagaagcccaggctgagctggaggattacaggaagaggaaatctctagaggatgtcacannnnnnnnnnnnnnnnnnnnnnnnnnnnnnnnnnnnnnnnnnnnnnnncaaacgtgtccagggctaaagcagaagatgcactgtctgaaatgaagtctcagtattcaaaagtgttgaatgagttgacccagctcaaacaactggtggatgcacaaaaagagaactctgtctctatcacagaacatttgcaagtgataaccacgctgcggactgcagcaaaagagatggaagaaaaaataagcaatcttaaggaacaccttgcaagcaaggaagtggaagtagcaaagctggagaaacaactcttagaagagaaagctgctatgactgatgcaatggtacctcggtcttcctatgaaaaactccagtcatccttagagagtgaagtgagtgtgttggcatcgaaattaaaggaatctgtgaaagagaaagagaaggtccattcagaggttgtccagattagaagtgaggtctcacaggtgaaaagagaaaaggaaaatattcagactctcttgaaatccaaagagcaagaagtaaatgaacttctgcaaaaattccagcaagctcaggaagaacttgcagaaatgaaaagatacgctgagagctcttcaaaactggaggaagataaagataaaaagataaatgagatgtcgaaggaagtcaccaaattgaaggaggccttgaacagcctctcccagctctcctactcaacaagctcatccaaaaggcagagtcagcagctggaggcgctgcagcagcaagtcaaacagctccagaaccagctggcggaatgcaagaaacaacaccaggaggtcatatcagtttacagaatgcatcttctgtatgctgtgcagggccagatggatgaagatgtccagaaagtactgaagcaaatccttaccatgtgtaaaaaccagtctcaaaagaagtaaagtggattccttggcaggacactgccccttgtcatctgtctttgtgttagatccagagttgtcggcagccgctgccattgttctcattcgtggtatgcactgtggcctagcgtagcttcttccctttccaaaggtttctgaggacttctcccaggagaagactgcccgcctcagaactgcttagagacttcaaaccagcagaggtgaaagtccctgtcatcccttcagattccagagctgggatcagccatgcccagaggtctggtcctgatgctggcaggggggccccctcctccatccctgactggctgagtggctttatcaccaccgagtgatgtgctgaggcctcctgcagtgaatgctccttccattcctgtactcgggcagtgccattcagcacaggagagctctttttgcctttggctttcaattccaaaacatgatttaatttctaactaaattagtatggcactagttatgaagtatctgcttaaaacccttcatcatgatatcctgtggatttaaaaactctaattccatgttttcttcccatctgccttatatatctcatcaccctgcttatcaatattcagtttgatgagcactattaactaaaatatgaaacttaaaaacaaaagcaagttgtccttaaaagttctttttttaagtaaattgttgacatactgcaaattttctatgcaaacttgcctcctgctgttatctgtgaagctcaggaaatccaaacatttgtgtttcaacaagggacagtaaactgtgtgtttacagccaaaagaaatgcctcatagttcttaacctcaacttttgtagaagtatttttttctctgtaatatttttattggctcataaagatgttttcatatctgaactcctaaataagtgaaattacagtagattatattaacaaaatactttttaggtagccatgcttgagactttttaaaaatataactttttccttaaagttttcagctatagcaaaaggtagttatgtatgccagacctaatatgagctgccaccaacacccctagaactttcagccatggtgtcttcagaattgtagcgcatttctgaatctagcaaatcctccttttacccgttgaatgttttgaatgccctgactctaccagcgcccataaatgatctctagaaggactgttagtaccaatctgtttttcaactttgaagctaaaaaccctgatatggtaatattatggtgcatagcagaggtctcggaaaaaaaatatttctgttcactttactttcaggttaaaaatgtttctaacacgcttgcaacttcccttatggcattaatcttgttgagggagagagacagaatcctggactctccaaagtatttaactgaaagtagggcctgctctgacagggcccatgtcccacaaggctgcttggcctcagtgggtgcttggctgtgctggatgatatgttgatctgtattggataaggaccaatgacagcaaagcaaaaatggctttaaagcttggtgttacttttcttaagttgtttaattatagttaagcaatttcaaaaatgctccaaagaaatgtgaaaggaccttttgtcacagcacttcagaaaatacacaacagccccttctgcccccgcacagaaatgctgcagagtatataaaacttgagacatttttgtaggatgcctgacgaggtgtagccttttatcttgtttccggatgcatatttattacgagtactctggttaaatattgaaaagttatatgctgtagtttttagtattttgtctttgtaatttacagaagttattggagaaaataaacttgtttcattttgcaaaaaaaaaaaaaaaaaaaaaaaaaaaaaaaaaaaaaaaaaaaaaaaaacaaaaaaaaaaaaaaaaaaaaaaaaaaaaaacgtcgtggggggcccccgcgcccccgaagacgctacacacccacggggggggggggggagccccacaagaagaacagagcacgaaaaggaccacaacaggcggtcacacaacacacactgcgggcagaaaaacaaggggggggggtaccaacaaaaaaaaaaaaggcggggggggaacaacgcggcgagatagaaaacaccagcaaggggaggcgtagtggagaacaacaggagaacaaacaaacagaaaggcaaacacaggcgccggcaaaaaaaaaccccagacggcagggggggaga

SEQ ID NO: 7771 - DNA, 976 bp, Homo sapiens
  misc_feature (867)..(890): n is a, c, g, or t
gcaaaacaaatacaaaatggaaagaaactataaatgtactagaaaaaaattggagaatttttaaaattatcatgtaatagggaaggtctatctcaggggaagaaagaaaaaaagaaatccagaggctatgaagataaaactttatacatttaactaagttaaaatttacattttcttcaaggcaaaaaccatacaagtagataaatgagcaaatgacacaaaagaattcacagaagaagacatgtaaaagacttttgagcatgaagagatgcttagtcaaggaaagcaaattcaaacagcaatgtaacctccttattaccttattaacctgcttattacagagagcgagactgtgataacagactgtaggtctgtgctgcctgctgcagtgcatctccccatgctcttggtgctcccatacacgccaggcgccttccaggtgccagcactggcttccttcctgggcagcaggctggacgtaccatcaggagttggtatataaactggctcccagagctgcccatagtgtcgctggcttgcacatgtcctggatggcctactgggcccagaaaaggtgaaatgtgaggagcacactaatcacaaaatgacccgagccaagtcgagccaatcctgggctagactggccaaaccccatgatatgatttggctgtgcccctacccaaatctcaacttgaattgtatctcccagaattcccctgtgttgtgggagggacccagggaggtaattgaatcatgggggctggtcttcccatgctattctcgtgatagtgaatacgtctcaagagatctgatggatttatcaaggatttctgcctttgcttctcatttttctcttgcccgctgcannnnnnnnnnnnnnnnnnnnnnnngccatgattctgagaccctctcaacactgtggaactgtaagacaattaaatctttttttttccccccaaaaaaaaaaaaaaaaaaa

SEQ ID NO: 7772 - DNA, 1326 bp, Homo sapiens
ctgaccacagagcgctgctcccgagaaccctgcacccctcaatggagtaaattaccataaagcctcttccttacccatgctttggggtgttaacagctgaggctattcgtcggtgacctgtgggactcgagctattcctgcagctctgggaacccgggagccgaggcatgacttctgcgttatgacccggctgctgggctacgtggaccccctggatcccagctttgtggctgccgtcatcaccatcaccttcaatccgctctactggaatgtggttgcacgatgggaacacaagacccgcaagctgagcagggccttcggatccccctacctggcctgctactctctaagcatcaccatcctgctcctgaacttcctgcgctcgcactgcttcacgcaggccatgctgagccagcccaggatggagagcctggacacccccgcggcctacagcctgggcctcgcgctcctgggactgggcgtcgtgctcgtgctctccagcttctttgcactggggttcgctggaactttcctaggtgattacttcgggatcctcaaggaggcgagagtgaccgtgttccccttcaacatcctggacaaccccatgtactggggaagcacagccaactacctgggctgggccatcatgcacgccagccccacgggcctgctcctgacggtgctggtggccctcacctacataatggctctcctatacgaagagcccttcaccgctgagatctaccggcagaaagcctccgggtcccacaagaggagctgattgagctgcaacagctttgctgaaggcctggccagcctcctggcctgccccaagtggcaggccctgcgcagggcgagaatggtgcctgctgctcagggctcgcccccggcgtgggctgccccagtgccttggaacctgctgccttggggaccctggacgtgccgacatatggccattgagctccaacccacacattcccattcaccaataaaggcaccctgaccccaaaaaaaaaaaaaaaaaatcgggtttttttttttttttgatagttgtgtctgtttgttgtgtgttgtatatgaagacacccccatcaacaagcagaggggggcggacaccgcgacgaagaggcgccggcagccccctctttgacagaggcgccgaactacagagggggggggcgtctaaacccacagcatggttggtcggggcgcggcagcgcgggacacaccaagcgcgggggcgaagacccacgagtgggggagacggtcgggcccccaataggctgaggatgacgccgcgaagaccggcgggccaccacaggggtg

SEQ ID NO: 7773 - DNA, 1885 bp, Homo sapiens
  misc_feature (414)..(434): n is a, c, g, or t
  misc_feature (1810)..(1810): n is a, c, g, or t
  misc_feature (1855)..(1855): n is a, c, g, or t
cgcggaggggcccggcgctagtggcccgcagacagcgcggcggcccccagcgggagaggcagcctggcggccaggacagcgcggccgggcgcctccgcgcggtgctctgggagttgtaggcacttgcctctcctctctccttcagctactggctctcgaaactcaaggacctaccggtgggtgggcgcctgtgactcccaggctgcgaacgccgggccccccccccccctagaaatgctcgaaccaggacggctcctggagtcctcgcgccctcgcagaaggactacgggccccggcgaccccgggggcggggcttccggcgcgctgccttgtgggcacggtagttccgccgggtctggcttccgcctgccgagcggccccggaccgcaggccggactacacttcccgtcggcnnnnnnnnnnnnnnnnnnnnnccgccttggcgcgagacgttggcaagcagagtgtctccaagatggccgcttggggaaggaggcgtcttggcccgggcagcagtggcggcagcgcccgagagagggtgagcttgtcggccacagactgctacattgtgcatgagatctacaatggggagaatgcccaagaccagtttgagtacgagctggagcaggccctggaagcccagtacaagtacattgtgattgagcccactcgcattggcgacgagacagcccgctggatcaccgtgggcaactgcctgcacaagacggccgtgctggcgggcaccgcctgcctcttcaccccgttggcgctgcccttagattattcccactacatttccctgcccgctggtgtgctgagcctggcctgctgcaccctctatgggatctcctggcagtttgacccttgctgcaagtaccaagtggagtacgacgcctataaactgtcgcgcctgcctctgcacacactcacctcctccaccccggtggtgctggtccggaaggacgacctgcacagaaagagactgcacaacacgatagcactggccgccctggtgtactgtgtaaagaagatttacgaactctatgccgtatgatttcagtagaacagggagcgaagcaaaaccacccggcccacaagagacaacagagtattcagatcgccacactctgtgaggcagcagagcctgggcaggtgtttggcttagtatttgttatttttaaaaaataacagatcacgggtgtacccagggtttttcagctcattacactaagatgtggatttccataacccaagaggggggtctgaggctgtggaagtccgactgggcagtggaatgctgatggaggcagacgctgccgagggggtgtggacgtgctttgggggaggtctttaagtctattgtttaactgtaccatccagagcccaccagaagctattgatcattaaaattatgagaatttcaaaaaaaaaaaaaaaaaaaaaaaaaaaaaacccgcagctgctgctgcacatctgctctgggtggcgtcttgcacatggaaggagcaggtgccatggtagccaccctgccctgctcctagctgcggcccagtgttaccacttacagcgacgacaagcctagatccaaggtagtcctggggccaaaccccgcccaggagcagtctcctggctcaccttggcctcatcattccgaaggccatcactgccaccatgctgttcaggaacatggtaggataaggtgacgaggcttggaggcctttgggtgtccacttgagttcacgtggggaactctgggttccaggatcgctcttcagagatctgaacacctgtgttttctttgaagcaccanaactcttcctctgtggaccatgagtttattaacccattgccctangctgacagaagagccctcggagcaatcttg

SEQ ID NO: 7774 - DNA, 926 bp, Homo sapiens
  misc_feature (892)..(913): n is a, c, g, or t
aagacagcctgggagggagaaggagttggagctcaagttggagacagcgaggagaaacctgccatagccagggtgtgtctttgatcctcttcaggaggtgaggacaagccagaggtccttggtgtgccctcagaaatctgcctgcagttctcaccaagccgctgtgaaaatggggataaacacccgggagctgtttctcaacttcactattgtcttgattacggttattcttatgtggctccttgtgaggtcctatcagtactgagaggccatgccatggtcctgggattgactgagatgctccggagctgcctgctctatgccctgagaccccactgctgtcattgtcacaggatgccattctccatccgagggcacctgtgacctgcactcacaatatctgctatgctgtagtgctaggattgattatgtgttctccaaagatgctgctcccaagggctgccaagtgtttgccagggaacggtagatttattccccaactcttaactgaaaatgtgttagacaagccacaaagttaaaattaaactggattcatgatgatgtaggattgttacaagcccctgatctgtctcaccacacatcccttcaacccacacggtctgcaaccaaactctaattcaacctgccagaaggaatgttagaggaagtctttgtcagcccttatagctatcatgtgaataaagttaagtcaacttcaaaaaaaaaaaaaaaaaaaaaaaaaaaaaaccccatccactccttcccctctccacatataagggcggcccgcctctataagtattccctccaaagggcccctaagttttaaagggctaccccccgttcttctgtttacacaacgggggcccccctattagggcgagtctcatannnnnnnnnnnnnnnnnnnnnntcgtcccctccct

SEQ ID NO: 7775 - DNA, 507 bp, Homo sapiens
  misc_feature (293)..(293): n is a, c, g, or t
  misc_feature (320)..(333): n is a, c, g, or t
cgccctttttttttttttttaattgataagaaatacatttattgatatggaaagttgtttgccatattatcaagttgttttaaaggcacagagcatatcacaaaacagtatgtgttgtgtgatcctatttgcatataaaagcaaaataagtaaatacacacataaatatatatacacatacataaacatacattatatttctctccacatacatataaatatgtatacacacatatatatgtatatctactcacgtatatatataactgaacacagtcaagtgtctcttacangggagaaaatgttctgagaaatgcatnnnnnnnnnnnnnnattgttgtgttcatcatagagtgtacagttaacccttgaacactgaaggggctaggggctccaatcccccatgaaaatacacatctaagttttgacttccccaaaaccttagctactaatagcctactgttgaccagaagccttaccaataacaatcaattaacacatatgttg

SEQ ID NO: 7776 - DNA, 2061 bp, Homo sapiens
  misc_feature (371)..(400): n is a, c, g, or t
  misc_feature (902)..(969): n is a, c, g, or t
gggagacttgcaatgaagttagaatgaacaggaggagtctgcagcttttcagtgcctgggataactatagtttaaagatcattgtgtaaaataggatttttagtcagcatgcattgttttaaaccgactaactgatagcctaaaactttatttttgcattttgccaatccttggagttttgttttgcagaattaagaaaaaaatgaatgtatgatcatctgaaaagggctttctctcaatcccacttcatggcatgacctctgctggatcattagttctagccagagaagtagcaaaggaacatgacgtctgagacctcccttccctcatcagtggggctgactgagctgggggcttgaagccggaggtannnnnnnnnnnnnnnnnnnnnnnnnnnnnngagaatggcaatggtctctgcgatgtcctgggtcctgtatttgtggataagtgcttgtgcaatgctacgtctgccatggatcccttcagcacactttccagcagcatcacctgcacagaccagaaggagggacgtgtgaagtgatagcagcacaccgatgttgcaacaagaatcgcattgaggagcggtcacaaacagtaaagtgttcctgtctacctggaaaagtggctggaacaacaagaaaccggccttcttgcgtcgatgcctccatagtgatttggaaatggtggtgtgagatggagccttgcctagaaggagaagaatgtaagacactccctgacaattctggatggatgtgcgcaacaggcaacaaaattaagaccacgagaattcacccaagaacctaacagaagcatttgtggtagtaaaggaaaaccaaccctctggaaaatacattttgagaatctcaaacatctcacatatatacaagccaaatggattnnnnnnnnnnnnnnnnnnnnnnnnnnnnnnnnnnnnnnnnnnnnnnnnnnnnnnnnnnnnnnnnnnnncagtgagaagacacagcgttttggcatcaccatggaaagtgggcttaaaaaagggtcttctcagtgaaatttttgggcatcatgaagaacgatcaactatcttctaatttgaatctatagttactttgtaccatttgaaatatatgtatatatatatatataatattttgaaatattatctattctcttcaagaaatgaacagtaccacagtttgagacggctggtgtacccctttgagttttggatgttttgtctgttttgctttgttttgttagtcatttctttttctaacggcaaggaagatatgtgcccttttgagaattcaagatggcactgacacgggaaggccagctacaggtggactcctggaatttgagcataataatgatattgatataaagaacttccttctgcttctaccagatggcccaaggaagcacatcgtcctgttttattgctttctaccctgtgcaatattagaatgaaagcttggtttaaataataatactttatattcaattgatatataataaccgttttaacctgttcccaggaaaaatatttttagaactactagcttttccacttagaagaaaatgaggattcttaagggagccactccaccatgctattaagactctggcagagttatgggtaggatatggatccctacatgaataagtcctgtaaatacaatgtcttaaggctttgtatagctgtcctagactgcagaaatgtcctctgattaaatccaaagtctggcatcgttaactacatagtgctgtagcaacaagtcttatcatggcatctctttctatgtttggtttgctttttccaagagtattcaggtctcctcttgtgagataggaaggccatgaaaacaattagatttcaagatgatctatgtgaccaaatgttggacagccctattaaagtggtaaacaacttctttctaaaaaaaaaaaaaaaaaaaattacaaggacaagagaaaacaaaagggggggccggctccaaaaattttcccccgaggggggcccaaattttgaggttcccccggttctcttgtgacaagggggcccccattgggggg

SEQ ID NO: 7777 - DNA, 552 bp, Homo sapiens
cctggtgcggcctccgggcccggtcggccccccttcctgcccccacactcagacgcgcgcccggcgtctccgggtcgctagttccgcgccttcctgcatggaggcgcgccccgagaggctcggacgcggccccttaggcccggcatcagcctccccggccagcaggagaagtcaggtcagcttcctgtccccgagcagctgcccgggggccagttttcaaaacatatccttagtcatgtaataaagagatgttcctctggtctcaactcccgatttttactttggaggggcgaaggcagggctacccttgccagccaccatttctcaatcacgtcgcggctgtggaaaagcagccgtcctgtcccttcagaaaggaactcgtatttccccctcgaacttttctcgtcggtgtgagagaagggccctccattttctcctcaggaagctttcgcggcccggcttcctctcaccaccaggccaggaaggcagtgacgccgcggcgaatatagccgcgtcggccgaggtttcgccatcttgagtggaggaggagcc

SEQ ID NO: 7778 - DNA, 1563 bp, Homo sapiens
  misc_feature (1364)..(1380): n is a, c, g, or t
ttttactgaccttgctagaagtttacagcaaggaagtgcaggaacatttcacaaatctacaatctgtgagtatcacatcctgtatagctgtaaacactggaataaggaagggctgatgactttcagaagatgaaggtaagtagaaaccgttgatgggactgagaaaccagagttaaaacctctttggagcttctgaggactcagctggaaccaacgggcacagttggcaacaccatcatgacatcacaacctgttcccaatgagaccatcatagtgctcccatcaaatgtcatcaacttctcccaagcagagaaacccgaacccaccaaccaggggcaggatagcctgaagaaacatctacacgcagaaatcaaagttattgggactatccagatcttgtgtggcatgatggtattgagcttggggatcattttggcatctgcttccttctctccaaattttacccaagtgacttctacactgttgaactctgcttacccattcataggaccctttttttttatcatctctggctctctatcaatcgccacagagaaaaggttaaccaagcttttggtgcatagcagcctggttggaagcattctgagtgctctgtctgccctggtgggtttcattatcctgtctgtcaaacaggccaccttaaatcctgcctcactgcagtgtgagttggacaaaaataatataccaacaagaagttatgtttcttacttttatcatgattcactttataccacggactgctatacagccaaagccagtctggctggaactctctctctgatgctgatttgcactctgctggaattctgcctagctgtgctcactgctgtgctgcggtggaaacaggcttactctgacttccctgggagtgtacttttcctgcctcacagttacattggtaattctggcatgtcctcaaaaatgactcatgactgtggatatgaagaactattgacttcttaagaaaaaagggagaaatattaatcagaaagttgattcttatgataatatggaaaagttaaccattatagaaaagcaaagcttgagtttcctaaatgtaagcttttaaagtaatgaacattaaaaaaaaccattatttcactgtcaaaaaaaaaaaaaattcattggggatctcttgatttgcctgacattgacttcagcaaaagcacggggctgtaaattaccatttactagattagccaaatagtctgaatttccagaaaacaaggcagaatgatcattcccagaaacatttcccagaaaatgtttcccagaaaactagacagcatgatcattcaatggatcacagtgaagcaaaggacacaactttttattgtaccccnnnnnnnnnnnnnnnnnttaactgatttgttgtggtgctcagacttttttatacaggtgctagtgttttatcctatgtattttaactcattagtgcataaaggcaagccccatataatgaagtctcagggtatatgaaagtagctggcttcaaaataaaatttttgagtgcaaaaaaaaaaaaaaaaaaaaaaaaaaaaa

SEQ ID NO: 7779 - DNA, 1090 bp, Homo sapiens
ccttttttttttttttttttttttttttttgcattataaaataatatttattgtgtcctgctgaaatggagcttgtagtctcatttcttaggcacttacaaggtaaaatttatgaaccatactttattaatgggcatttacaaatgcctgaaataaaaggtgacttgtagaagggataatatatcttattgcaaacatgacacctagcttctcgaatacggttagtggcatttgccactagtgagcataatttccatgttcaaatgaataatgaactaatcaaaaaacctttttttgaggaactgaggcactcagacacaaaacacaaaattaggcactcagacaaaaagcaacttattagccagttggagagagagctaagaaataccatatctatataattatcagagaatgtgataaaaagctactactctgtacttgtgtgccaaatgctgtaaaagtataaatagagggcaatatatttcgctttggacgggaggttttagaaggccgcacaagagggatattcagtctgatgcttgatgtagacagaagggagagaagggcatcccagacaacatgggcaaaggcatgggaggatttggtgggtgtgtgggcccatgataattctgtgtggctggagccttagggagcaggcaggagacagcctggaaggtctgatgggtcagattgctaaggagtgtggttccccaggaaaaacattttagtgtggaagtgaagtgataagatcctcattttagaaagattgctctttatgtaatagcaacccaggtaacacgtgataaagcaatgatctgagggagtgagcatgtagagggaaggtgtattagagaattaggccaattaagggcacatgcctgagaggagccatatagagaagttggaattgacaggacctattctctgactagatgtagaggggatctggggtgacagggagaatgaaggagccaaggatgaaaaagttttctgccttgggtagctgctgattggtgaagcagtgaagaatagcagttctgcacccagcccctggagttgaatcctggcttttctatttactaggatgagc

SEQ ID NO: 7780 - DNA, 625 bp, Homo sapiens
cagataaaatgatatgaatctggagtttgcttcaaaatgatataggagaaaggggaagtggtgggggcacagatcatccaaaattagctaaggagttgcaaatcattgcagctgggtgctgagtgcgtgggcattccagtgccactcaatctgtgttctggaacaggtgcccatgtgcaaactattacaagtctatgaagatatgagtaagagagaccgagagaagcattcagaagcttttatagcaaaccagcagagtaatgctatgtctgttaaatctaataataaaagaattttgtctgtctttgctttctaatcttgttttcccaggaattcactttttacaaaactatcagtccatgactaattgcacattaattaaaaaaaggacagatagattgagaagtcctgctttatatgaacagtctctactcacatataaatttacaatgatataaattttttgttattttacaaatataaagatgaatgtaagacacaaagctgcctctgagttggtctgatggaaggtgccctccccatccctcagtgcacccgcaaagctgcctctggagtttgggtctggatgggggtacgccccatccctcagtgcacgcacaagtaa

SEQ ID NO: 7781 - DNA, 2240 bp, Homo sapiens
  misc_feature (1674)..(1674): n is a, c, g, or t
  misc_feature (1687)..(1687): n is a, c, g, or t
  misc_feature (1755)..(1756): n is a, c, g, or t
  misc_feature (1902)..(1903): n is a, c, g, or t
  misc_feature (1970)..(1972): n is a, c, g, or t
  misc_feature (1974)..(1975): n is a, c, g, or t
  misc_feature (1980)..(1981): n is a, c, g, or t
  misc_feature (2001)..(2005): n is a, c, g, or t
  misc_feature (2051)..(2052): n is a, c, g, or t
cccacgcgtccgaaatggcggcggcggcggcggcggctgcagctacgaacgggaccggaggaagcagcgggatggaggtggatgcagcagtagtccccagcgtgatggcctgcggagtgactgggagtgtttccgtcgctctccatccccttgtcattctcaacatctcagaccactggatccgcatgcgctcccaggaggggcggcctgtgcaggtgattggggctctgattggcaagcaggagggccgaaatatcgaggtgatgaactcctttgagctgctgtcccacaccgtggaagagaagattatcattgacaaggaatattattacaccaaggaggagcagtttaaacaggtgttcaaggagctggagtttctgggttggtataccacaggggggccacctgacccctcggacatccacgtccataagcaggtgtgtgagatcatcgagagccccctctttctgaagttgaaccctatgaccaagcacacagatcttcctgtcagcgtttttgagtctgtcattgatataatcaatggagaggccacaatgctgtttgctgagctgacctacactctggccacagaggaagcggaacgcattggtgtagaccacgtagcccgaatgacagcaacaggcagtggagagaactccactgtggctgaacacctgatagcacagcacagcgccatcaagatgctgcacagccgcgtcaagctcatcttggagtacgtcaaggcctctgaagcgggagaggtcccctttaatcatgagatcctgcgggaggcctatgctctgtgtcactgtctcccggtgctcagcacagacaagttcaagacagatttttatgatcaatgcaacgacgtggggctcatggcctacctcggcaccatcaccaaaacgtgcaacaccatgaaccagtttgtgaacaagttcaatgtcctctacgaccgacaaggcatcggcaggagaatgcgcgggctctttttctgatgagggtacttgaagggctgatggacaggggtcaggcaactatcccaaaggggagggcactacacttccttgagagaaaccgctgtcatttaaaaaggggagcagcccctgagcaccaaaaaaaaaaaaaaacaatcctctgttaggcaccacactggttggtcaacttggatgttcatcgacgccccatttatccgccgagttcccgacctctccccgacgatcccccctccgaccgcacccaccatcattcaaaagacgtgcacccactaccaccacatacgaccaaaaacacccataacccacacccacctcacactggtttcacaccgccgcgggctcatacactatacaacaactaaaaaaccccgccccccgccgcaatccccaggcccccgcgccgcccctcaccgcacaccaccattcataccgaccgcacatcgaatcttcctactcctcgacgcggccccccgactaatagatagccacaaaacagacaccacgcccgattcgactcccgtgcgcgaccaccctcccatactatacggttcacttgacacaccgccgcagccaacacagattatatatgatcgcactgatagctagcacgaggacaagcgcaaacaaaccaataatatagccaagcgctcgtaaacatctctcgtaataaaaaaantaccgactaactnctccaacatacataaccgtcgacgaacacaaaatgtgtgcggaactagaaaacgaatacatccagacnnccgtgacacacgcaactagacgatggcgatcctgtaaggcctcctggagtaatataccctcgcacctacactacaacaccaatctatgtcgacctcgtctccgggtttgccatatgccgcaccgttccatatctctctgccggacnnaaagccaagacagcaccgcagagcgagttaaaagacgtacgcccaaccacgcgctcgagccctctcnnntnnataanntcctctcgtcccgacgcggnnnnncaccgttatgccgtcacacatcactactatgaccgagaacacaatnngtcgacatcggcgctcacgcgcctcacaaaaaacacaccatctcacaccgctacccccgcacatctaagataccacgcggcagtcacgaagcaccaacgtaaactctattccacacaacagaatcaccctcagtctcatctcacctaccctacacctgccaaacgtatcacccaaaacaaaaaaaaaa

SEQ ID NO: 7782 - DNA, 1734 bp, Homo sapiens
gtctccctgtgtggtggaggatgtctgcagcagcatttaaattctgggagggcttgggaggcagcagcagcaggaggaggcagagcacagcatcgtcgggaccagactcgtctcaggccagttgcagccttctcagccaaacgccgaccaaggaaaactcactaccatgagaattgcagtgatttgcttttgcctcctaggcatcacctgtgccataccagttaaacaggctgattctggaagttctgaggaaaagcagctttacaacaaatacccagatgctgtggccacatggctaaaccctgacccatctcagaagcagaatctcctagccccacagacccttccaagtaagtccaacgaaagccatgaccacatggatgatatggatgatgaagatgatgatgaccatgtggacagccaggactccattgactcgaacgactctgatgatgtagatgacactgatgattctcaccagtctgatgagtctcaccattctgatgaatctgatgaactggtcactgattttcccacggacctgccagcaaccgaagttttcactccagttgtccccacagtagacacatatgatggccgaggtgatagtgtggtttatggactgaggtcaaaatctaagaagtttcgcagacctgacatccagtaccctgatgctacagacgaggacatcacctcacacatggaaagcgaggagttgaatggtgcatacaaggccatccccgttgcccaggacctgaacgcgccttctgattgggacagccgtgggaaggacagttatgaaacgagtcagctggatgaccagagtgctgaaacccacagccacaagcagtccagattatataagcggaaagccaatgatgagagcaatgagcattccgatgtgattgatagtcaggaactttccaaagtcagccgtgaattccacagccatgaatttcacagccatgaagatatgctggttgtagaccccaaaagtaaggaagaagataaacacctgaaatttcgtatttctcatgaattagatagtgcatcttctgaggtcaattaaaaggagaaaaaatacaatttctcactttgcatttagtcaaaagaaaaaatgctttatagcaaaatgaaagagaacatgaaatgcttctttctcagtttattggttgaatgtgtatctatttgagtctggaaataactaatgtgtttgataattagtttagtttgtggcttcatggaaactccctgtaaactaaaagcttcagggttatgtctatgttcattctatagaagaaatgcaaactatcactgtattttaatatttgttattctctcatgaatagaaatttatgtagaagcaaacaaaatacttttacccacttaaaaagagaatataacattttatgtcactataatcttttgttttttaagttagtgtatattttgttgtgattatctttttgtggtgtgaataaatcttttatcttgaatgtaataagaatttggtggtgtcaattgcttatttgttttcccacggttgtccagcaattaataaaacataaccttttttactgcctaaaaaaaaaaaaaaaaaaaaaaaaaaaaaacggcccgaaagattaaacactttggggggcccagggagaaagggccacggccagaacgcgccaaggggggttccaaaaacggggggggcgaaacaggggcggcgggtacagcgcgcaaccg

SEQ ID NO: 7783 - DNA, 2945 bp, Homo sapiens
gcggccgcaagccgtcgccccctttaagagcctgctccgcgggactaacgttcgaacgggccctggcgcccctcctcgggctccgattggccgtgcgcggcgcacgagggcgcgccggccagccccggaacggttggcggcccttcgtgattggcggtcgagaagcctatataaggcgcggggcagccaggctgccctgtttagcgaccggacccgaaacggggaagttgtcttgtttggagaggttagtagagcagcgcgcgcgtcaccagagtcgtttctcttcggagtcttaggtgatcgagggtgtgcccagggggcggacttgtttgcgcctcccgttccctcccaatttccaaacgtgtcaccccggcgccgacggccctgtgcaggggaagcagatggagttcaagctggaggctcatcgcatcgtcagcatctctctgggcaagatctacaactcgcgggtccagcgcggcggcatcaagctgcataagaacctcctggtctcgctggtgctgcgcagcgcccgccaagtctacctgagcgacccgtgccccggcctctacctggccggtcccgctgggaccccggcgccgccaccgcagcagcagcccggggagccggcggccgggccacccgccggctggggagagccgcccccgcccgccgctcgtgcctcttggccggagaccgagccgcagccggagcgctcctccgtctcagacgcgccgcgggtaggggacgaggtgccggtggccacggtgactggagtcggggacgtttttcagggcggagaggcggacgcgacggaagctgcctggagccgcgtggaggggccgcgccaggcggcggccagagaagccgagggtaccgccggaggctggggcgtcttccccgaggtatctcgtgccgcgcgccgcccctgcggctgccccctaggcggggaggacccgccgggtacaccggccgcgaccccccgcgctgcctgctgctgcgcgccgcgaccagcggaggacgagccccccgcgccgcccgcggtgtgccccaggaagcgctgcgcggcgggggtgggcggcggcccagcgggctgcccggcgcccggctcgaccccgctcaagaagccccgccggaacttagagcagccgccgagtggaggagaggacgacgacgcggaggagatggagaccgggaacgtggctaacctcatcagcatcttcggttccagtttctcgggactcctacggaaaagccccgggggcggcagagaggaagaggagggagaggagagcggtccggaagccgccgagcccgggcagatctgctgcgataagccggtgctgagagacatgaacccctggagcacagccatcgtggccttctgagcccttggcccccctgcggggaggaggtggagcagcgggcgtccccgaagtgagggccaggcccttcccggctgcgaggacgcccagagaccgcgggcgctgagcgcgttgggcagactggttgcctctgggcatcgaaactgcccccggcgcatctggcttatctggagacctgggagcttgaggctcattggaagaggacgatcgttaacttttgtgtttgtgtatgtctgtgtatgtaagtttgtcttgtggcattaagactattttgctcttctggaatgcaccactccttccccagggtttaagagattgggggcagacagggactttcctctgccggctgcgtggagaaggaagcggctaaaaggtttgggccggggagttccccattcgttctccggggagggagggactttacacctacccctcaccggaaagctagacccgcttcagggccaggagtggcgtttccgcacaggatttcctaagacgagagggatttagccaagagcacagacttggattccttctgtccctccccacctttctctcccaatgaagaaacgtttatatcctgtgattactctaggaaaggggcgtattaacggtcctttgcttccccgcaggggagaaaaagcttgacgaacttcacagaagagttcaagcttggaaataatggagtttatagagaaaagatatatttttaaaagctctaggtcagaagtactacacagtgcttttaaaaagtgtttaatgagagtttacagacagaagcccgaagtggaaagaccttatggttttgtagatatggtgactccagtctttgttgtataaaggttgggggagctgataaggtttttgtacagtattttctccttcgttgtattgatttttgtataaaaatgtaacttctacgtgtctaacacgtattaaatattttgaagcaaaaaaaaaaaaaaaaaaaaaaaaaaaaaaaaaaaaaaaaaaaaaaaagggggggggggaaaaaaaaacggcggagggggcgcccaagatagacgtgaacccccaccatattggagcgtacaaaaaggggtggcccccaaatgtgaggcacgacgactatcaataaagaacacagggaaggcggacgcgcaagaacaacagagacgcactacagtgcggaaacaacggcgctcacgaggaggcaacatcggaggaagaaaggagacaccaaaaacgaagtgggggatgaggagcacaagtgggagcaagacccacacaaagaagaaattaagcgccaacacgggaaaaaaaaaaaccaaaagagggtcaacgcgggagaccacagccggggaaaaacagtggcgaggataagaacagacacacaagagacaatgagaacaaaacaactcatacaacgcagcgctccagcacaaccacacacgaactcaacaaaacaacaaacaaaccaaacaaccaacaatgagaacaaggaaaaaacaaaaaaaaagacaaacaacgcaccgccagaaagcaacaaaaaaaaacaacacaaagacaaacaacaacaacaag

SEQ ID NO: 7784 - DNA, 6079 bp, Homo sapiens
  misc_feature (490)..(510): n is a, c, g, or t
  misc_feature (3882)..(3898): n is a, c, g, or t
ttttttttttttttttttttttttttttttaaagtttgaatttaaagttttatttttgcaattcagttgtatagaaatgttacataaattcctaaatgctcaattcaggtggcatgatttttagaatattatcttcttcaagatgaatacttaggtctacttcagctctgatattctatttttactttcttacttgaagtgagaaaagagaatggtgaattgtattatagcggtaatacattatttttattttagcttagatttacatttatcagtaaaacgtgtcagtgggctgggtgcagtggctcacatctgtaatctcagcagtttgggaggctgaggtgggcacgccacttgagcaccggagttccagacgagcctggacaacatggcgaaaccccaaaaccccatctctacaaaaaatacaaaaattagctgggtgtggtgggacacgcctgtagtcccagctacttaggaggctgaggtacgnnnnnnnnnnnnnnnnnnnnnaggaggtgcaggttgcagtgagccaatattgccccactgcactccagcctgggaagcagagtgagaccttgcctcaaaaaaaaaaaaaaaaaaaagtgtcaatgaagaaaggaaacaagactttttatagttgaaccaggcttattgtattttaaatccctgaagaagaattcttcatgttatcactcttgtacagaaagatataaagtgctcagcttattttgctgattttgaaaatcaaacactatctccttgccctaaaattatagcgtgtggctcatcctcttatcccacccagatttctatctggttggttagggtagtccatgcctcaaggaaggcggtgcagcttaatttaacatattgttcagtaaagaatcccattgtgtatcataagaatcccttatccttttcgggccctccaccataccagactgaaaagtattccattgtccagaagtagctggtcttgagatttttattttcaagtgtattttctgtgatgttgtctcattgttatggaatagtttaggataattttctgatctctacagtagcatgtgaagtcacaatttgttgccacttacattgattatctcctaacatgcatttggcactaaattatttttctctttagaagtatatgaagattctgaattaaaccattcattaattacactgcagttttcttctttgagaatcttctatgaaggacaggattatttaaatactttggtagagtgaaaagggaaaagaattttggataaaagcaatatgaggccggacgtggtggctcacatactttgggaggttggggcgggcggatcacctgaggtcaggagttcgagaccagcctggccaacgtggcgaaaccctgtctctactaaaaatatacaaattggccaggcgtggcggtgcatgcctgtaatcccagctactcaggaggctgaggcgagaattgcttgaacttgggaggtggaggttgtggtgagctgaaattacaccactgcactccagagtaagactcctctgtctgaagaaaaaaaaaaaaagcaatatgagggaattctaatgaaggagaatattgattccactgacatgtttcatttggcattttacattcttggacttcttcttgagataaaagtgctgcaaaattctaaataatgaaattactagtattcagatactccaatagcaaacacatttttaatctgaaattatttaccaccatataatgcctgaaaccataatgaaattttgttactgactagagagaaaccactgtggaagtgcaagatgaacaaaaagcggggacatactttaaattctgtttatctgccttcctgcgcctaacagttaagctaaaccagattcaactgatttctctagttacctttcattttggatttagtgtgtgtacacctctattctttattctttgatgtcaggttcttaaaggaagtgataaacttcttcgtgctaaaatatcacaatcctagcaagaccgcttacaaaagactcgagttggtgactaaataggcttctatgtccggaaggccagctggccttcctgatcaccaaataagtacagggtgattactcaaaatttgaagttacttcctagttcttaccaggcagaaatatgtagtaactaatcaaagcaaaatgctccattactaaagtgatttctaagaagtctgaggtaagaataatttaaaaataactagagacaccgagtttctatttctattccttgtatatgtgactaagatgtcagataaatgagccgaacgttttatgcagctaaatttattctcacaacaaattacatttaaatgtgtaaaagtggtcaacaggaaaagggcataaaggaaaacaaagcgttctttcaggggaagtaagctgctctggaggccaggaactactgcttgcgttgacacggtgtgagtgggtatctttgccctgaagctgaagttaaactttctactggccgtgtggcacacacgttagatgtgtattaggttaagcctggccaactagagagcgaaggggcttattagttaaattgtgctaatatcagttaggaaaatgcttgtcatgttgtggtgaaatcttgaggagtttgtgttgcaatgcctgggacatgaacgggccatacaaacagaggaaagctctggggcttccaggcaatggccttgtgtcgagtcatcttacaagtgtccatcttgaaatcataaagtggatttaaaaagaagtagcagtgccacagtttatcaccaagaacttattttaatggaaatgggtctaatgtcccttcatgcaacaagacagatgaacaaaaaacaatggtcctaattagctatgagtgatcttgtatccaggtggaaacaaagggcatgtgtacatgtatatatctcttagatgaaatcacacatgttgtgaagggtagaaaaacgaagcaccaagcagtgctttagtctgcaaaggaaagtttttagccataggcatgttggctagtcgttccccttgatgttgccaaggagcagatgtatgaggtggcaagtctgtgtctatctagctgcttttaaaaaataaaaggaactttaagcattttgccttttcttctacatatcccaatagaaatgtgactacaaatcattacaaaaccactttttaggcaatgtatagttcactgagattacttagatctggatacactgggagataatatccaggaaagataatacattaacacaataatgcagtatatttcagtaaaaatagaataaataaaataaaaatattttaagctgtatttaacaggttaattaaaaatatggtaagacatagaaggcatcgtgaacatggctgcctgtttaccgaatcacagatctaaagaatgcatagataactgaagtgtcactaagatatcaggtaaaacattggcatccttttacaaacaaatacacacatactttcatacatactttttggccatggcagaaagtgtctgaacatactctttaacataattttacaaaattaatttgcatttactatacaatgccattttcaaaacaaaacgtctgcaaagttttcaatatgtaaaggctatcattcatcttaatgcatcctataattgcacatataaatcagtttgctacttaaagctagctcagaattcttgatcttgaaaacaagcaaatgtatgccttaaaaaatgaagagggagttctggtagagatttccaatataaaagtgggtaatttgtttagaattttgaaatttatcacactaaaatgtttcactacagcgaccgagatgaaagatcactgtaaatgatttctgaacagcttttcaaagggcacnnnnnnnnnnnnnnnnntgcagtaatttcttatgatggcactggttacttcagatcagtagtatgtcaattggtgaaaaacagactgcgtttctaaagtagcatagttttgtcataacattggggtgctaagacaattccggtccccctgtcccccacccctcatgaattctgagggaatggcaggtagaaaagccacccactcattccatcatgatctctggtggctaagtaccatgagttaggaatgtctaccacaagtagcatctggaaaatctcgtagatggaacaggctgtgaatgtagaatcctgccctctacaacacttttgaggcacgctgtaggaaaacagtcctggacttagatagggcaccatcatgaataccactgcgtaaggaatttggacatctttctcccactcgtgtagggaattctaagattccctgacaatagatctttccatacctgctcttcttagtatatgcccagaatcattctggaaaggctcttcctgacggatatggaggcagcacaacacagcaagaacgggctttgggagccgtgggtcctagctggctcttctcggcgtgctgcggcggaacggctgttggtttctgctgggtgtaggtccttggctggtcgggcctccggtgttctgcttctccccgctgagctgctgcctggtgaagaggaagccatggcgctccgagtcaccaggaactcgaaaattaatgctgaaaataaggcgaagatcaacatggcaggcgcaaagcgcgttcctacggcccctgctgcaacctccaagcccggactgaggccaagaacagctcttggggacattggtaacaaagtcagtgaacaactgcaggccaaaatgcctatgaagaaggaagcaaaaccttcagctactggaaaagtcattgataaaaaactaccaaaacctcttgaaaaggtacctatgctggtgccagtgccagtgtctggagccagtgccagaggccagtaacctgagccagaacctgagcctgttaaagaagaaaaactttcgcctgagcctattttggttgatactgcctctccaagcccaatggaaacatctggatgtgcccctgcagaagaagacctgtgtcaggctttctctgatgtaattcttgcagtaaatgatgtggatgcagaagatggagctgatccaaacctttgtagtgaatatgtgaaagatatttatgcttatctgagacaacttgaggaagagcaagcagtcagaccaaaatacctactgggtcgggaagtcactggaaacatgagagccatcctaattgactggctagtacaggttcaaaatgaaattcaggttgttgcaggagaccatgtacatgactgtctccattattgatcggttcatgcagaataattgtgtgcccaagaagatgctgcagctggttggttgtcactgcccatgtttattgcaagcaaatatgaagaaatgtaccctccaaaaattggggactttgctttttgtgactgacaacacttatacctaagcacccaaatcaaacagatggaaatgaagattctaagagctttaaactttggtctgggtcggcctctacctttgcacttccttcggagagcatctaagattggagaggttgatgtcgagcaacatactttggccaaatacctgatggaactaactatgttggactatgacatggtgcactttcctccttctcaaattgcagcaggagctttttgcttagcactgaaaattctggataatggtgaatggacaccaactctacaacattacctgtcatatactgaagaatctcttcttccagttatgcagcacctggctaagaatgtagtcgtggtaaatcaaggacttacaaagcacatgactgtcaagaacaagtatgccacatcgaagcatgctaagatcagcactctaccacagctgaattctgcactagttcaagatttagccaaggctgtggcaaaggtgtaacttgtaaacttgagttggagtactatatttacaaataaaattggcaccatgtgccatctgtacatattactgttgcatttacttttaataaagcttgtggccccttttaaaaaaaaaaaaaaaaaatactgaagaatctcttcttccagttatgcagcactggctaagaatgtgtcatggtaatcaggcttc

SEQ ID NO: 7785 - DNA, 5387 bp, Homo sapiens; identical to SEQ ID NO: 6138
  misc_feature (2554)..(2568): n is a, c, g, or t
  misc_feature (2970)..(2998): n is a, c, g, or t

SEQ ID NO: 7786 - DNA, 519 bp, Homo sapiens
tttttttttttttttttgagaactcatctacataaaagagggtaagctggattgcagccagcagttatccgggtcaacttcagtacactgtgttttgaaaatttccagtgggaatccttccacacaggaggtatcattgttcccactgggatgccccttcccaaattctctgtttgttccagaataattacaacctgaagagaaatctgcctggggttaaagtcagatgttttgttcagataaaacacaggcagcccgactggcaaagcacaacttattcagtgttcctgtgtcgtggattaattcataacctcaaatgcataatcagatgaacgtggttcagagaacagcacagtcctctagtgttcttgctaaaataacaatttttctcaacttctgtgtgctcaagaggttggagcaaactgatgcttggctgaaagggaacccagtgcaaattcaccttcgagtcccctcatcaaggtgacgtgaacccttctgtcgtcttctagcagccgtata

SEQ ID NO: 7787 - DNA, 2009 bp, Homo sapiens
  misc_feature (462)..(482): n is a, c, g, or t
gtaggtgaggaggtgggtaggagcttgcttatagaaaagtggaatcgagtagtccttgctggtggagccgctgccgccagggaactcagggccggctcctgttccttcaagagtgctggaggccaaacttgaaatacaagtttaatgttcctcgtcgggcaaaagataaggatccgatctcccccggcccggtgtgcagcaggagcgaccaaccccgacccgggttaaaactcccagggactcttcgctgctgccacctcttgttctctcccccgttcccactcggggtctccctcagggccgggaggcacagcggtccctgcttgctgaggggctggatgtacgcatccgcaggttcccgcggacttgggggcgcccgctgagccccggcgcccgcagaagacttgtgtttgcctcctgcagcctcaacccggagggcagcgagggcctaccaccatgatnnnnnnnnnnnnnnnnnnnnntgcgcttgtggaccccagtgggcgtcctgacctcgctggcgtactgcctgcaccagcggcgggtggccctggccgagctgcaggaggccgatggccagtgtccggtcgaccgcagcctgctgaagttgaaaatggtgcaggtcgtgtttcgacacggggctcggagtcctctcaagccgctcccgctggaggagcaggtagagtggaacccccagctattagaggtcccaccccaaactcagtttgattacacagtcaccaatctagctggtggtccgaaaccatattctccttacgactctcaataccatgagaccaccctgaaggggggcatgtttgctgggcagctgaccaaggtgggcatgcagcaaatgtttgccttgggagagagactgaggaagaactatgtggaagacattccctttctttcaccaaccttcaacccacaggaggtctttattcgttccactaacatttttcggaatctggagtccacccgttgtttgctggctgggcttttccagtgtcagaaagaaggacccatcatcatccacactgatgaagcagattcagaagtcttgtatcccaactaccaaagctgctggagcctgaggcagagaaccagaggccggaggcagactgcctctttacagccaggaatctcagaggatttgaaaaaggtgaaggacaggatgggcattgacagtagtgataaagtggacttcttcatcctcctggacaacgtggctgccgagcaggcacacaacctcccaagctgccccatgctgaagagatttgcacggatgatcgaacagagagctgtggacacatccttgtacatactgcccaaggaagacagggaaagtcttcagatggcagtaggcccattcctccacatcctagagagcaacctgctgaaagccatggactctgccactgcccccgacaagatcagaaagctgtatctctatgcggctcatgatgtgaccttcataccgctcttaatgaccctggggatttttgaccacaaatggccaccgtttgctgttgacctgaccatggaactttaccagcacctggaatctaaggagtggtttgtgcagctctattaccacgggaaggagcaggtgccgagaggttgccctgaatgggctctgcccgctggacatgttcttgaatgccatgtcagtttataccttaagcccagaaaaataccatgcactctgctctcaaactcaggtgatggaagttggaaatgaagagtaactgatttataaaagcaggatgtgttgattttaaaataaagtgcctttatacaatgaaaaaaaaaaaaaaaaaaaaaaaaaagcgggggccgggcccgaaaaagtttaacacatttgtgggcggggccagggaatagacagggcaagcgtcaagaacccggcaggaaaggggggttccccaaaaaccccgggccgcgcgtgaaccccggtctggtcccggtcaggcgcctccccgggcgcgcccaaacaacaagcacacaga

SEQ ID NO: 7788 - DNA, 1653 bp, Homo sapiens
  misc_feature (1482)..(1507): n is a, c, g, or t
gttaggatgttgttggggaaggcactgggattttctgtgtcttgcattcacagagggaggccatttcagattcaagagcatggattagggaatcgtgaggcagggatgctactgcgtatttctctctgcaggtggggattaaagttcctttccccatgggtttgaagcagactcagactgtctcaggatcaaagcaaccctcaatggtttgatttatgtcattgcttaccactccccaaccaatcccaggacagctgggtcactgtacccctttgtggtatctgtacctgggcctctccttcctcatagggaccagctgattgaataaatgtgaccaccttatttccaccccccacccccaaaagctacattggaattatttttcctagaaatgtgtataacactcagaattgggcattgatccttaaagcttcatcccattcaccgtattcaacatctgtcatctcttagtgtctgcagtctgaacctaaccttgaccttttttccctctggtttgagaaaacttggacactatttctacttggccaggtgtgggctcaagagccttactctttccatctcagtttaggggcgcagccagctcctcttcccaatagggctctttctgctttccctctccttggccctagatttgtaatccatgaaaaagcacaaggtcctggctccttgcggtcacattctggttctctgtgttgtggactctgctctcactgttcacccagcactagcagtaccagatggttctgtggagtcctggggaatggagagagcacagtctgactccctgccaagtagccaggagttgacttgcccatggtccgctggctttcccaccacttcctacaggatgggatctaagagactcaagagctgggtttctttcagcactctgtactgtcccaaatagcaaacaaatcactttgtagccagatttctgaatggaaatgagaaattgaattctccatggacttttaggtttatgggggagttttagctgtgtttcttggttttatttcagccaaacatgtctgcttttgattttttttttaaagtataagtggtctatatatatgttcaccttttaaatgtaaatgtttaaaaagtaagcatttatgtgtttccataactgacatctgatgcagacctcattctctccccctcttctaccctcctcttttcccccttttcatactcttgtattggttctaataaatggttgcttttcaaaaaaaaaaaaaaaaaactcgcggcacgagggcaggtcacttaagcccaagagttccagaccagcctggccaagatggtgaaaactggtctttactaaaaatgtaaaaactacccgggcatggtgtcgcatgcctgtaatcccagctactcgggaggctgaggcttgaggatcgcttgaacctgggaggcagaggttgcagtgagccaagatcgcgccactgcactccagcctgnnnnnnnnnnnnnnnnnnnnnnnnnnaaaaaatatatttaaaaaaaacttgtaggggggccccggaccaaattctccctttgggggagccttttacatatcactgggccgcgtttttaaaacgtcttgacttggatggctaaatactaatagggcctcccctatcgcctttt

SEQ ID NO: 7789 - DNA, 10725 bp, Homo sapiens
  misc_feature (85)..(85): n is a, c, g, or t
  misc_feature (5380)..(5407): n is a, c, g, or t
  misc_feature (9881)..(9898): n is a, c, g, or t
aaaaaaagagaaggaataaagatataatatagtaaataaataaataataaaattaaatataaaagtaaaataaataataattaantagttaaaaaaaaaatataaaaataatttataatatatttataaaaattaatattattataaaataaaaaataattataaaaaatttttttttttttttattcacaaacaaaacagtgattaaattttattcctttttgagttgttttgtttttatttttaaatgaagtttccatctgtacacgttaagaaaataaacaaaacaacaggaagccattctctgtgtatcctccttggaggcaggaaggatggatctgccgataggcacacaacagcacacagccagggctcatgggagtgagtgcccgtcacctcacgaaggtcatgggcctaaaacatacggaggctccatagaaaatgctccagctggttttgcagtcatgcataaaggtgaggacacttaattcaaggcatctgggggctggtgtcaccgcacatgaagagtagtgcccatgctgtcccacgagcttccttgggaaaagggaaaaacaaatcttttcctcaaatagaattgtcgcaggaaagagccatgacattttattcactgtttaatcatcgggtggcaggatttctttgaagtagaatctggtagtacccctcccaatctttgctggatcacttctaaatggtgaatatactctgtcaaggaatgttctggatcttgagaagcagtcagggatctttctaatcttgaatttggggatggagtggctcttcccccactgtgtggggaggctgctgctgccagtctgcggcctctggcagggtccctggtgtggccagagggtacatcccgggttgggggggactctctggttctgggtggagactgcggctgtcgtgctcggggccctgggcgaggggctttgccttgtgccagagctcctttccgatctacttcttgccatttcttaaccaaaaaacgtaatcttaatattgcaatgaccaccctgacggccgtgcggaacctggtgaaaggacgagatgtgattttccgttctgctttggaaggaaatacccccaaatgggcaatcatggagagtgtttcttgttcagaatcctggaatccaccaatcaacagcaaaagatacttcttttgataaatcagagcttttctaaagctctctgctctcaagtaatgcaggtacaatttttccatcttgacattgctggtgtgtgcttcctcgctggcagctggtggaagccggccggggtctgggcgcctcagggaactctgtggagccgtttcgtctggcttccaagcagacctttccgacctgcttgggctgcagcccttctgcagatggtgcttcagcaacttctcaagcttagacacggctctgctcagctccagcttctcctgggtcaccgtgctgagcgcttttgtgagggaaacattgtctttcagcaggacgtccacaaactggaactgcagctctgctgccatttttttctgggaggaggtgggcctgctcaagtcagacttcagctcctccaacgtgtgcagtaaagacatcactgctttctcattggatgacgtccaatcattaactgtcctgtccacggcctggctggtgaagctggtgagaagccgggcggcagagagcagccgctgcctcatcgcctccagctctcgctgctgttcccggaggtggtccgcatccgagccggcagccctgcgggcagaacctaggtggaggcggctgccaggcacctcgtccttcgactccaggtctctcactgtctgctgaagctgcttgatcttatgcaagtcacgctgacgctgcagttctaattctcgcagcttctccttgtctctctgccacttcctccactgctccgcagccgctgggctctgcctggcctccgcgctcctcctcgcagccttgcgtccttcttgctctttcaaccgtgggtgtgactgctctaattctgcctgcaaccacgctggtttctccctctctctctccagagagcatctcagctctcgtttttgggtgtgcagggcttccaccgtcgacttcagtgtggcacttacctccttctctctcctgagcgcctcacagtgcttctgagcctcagcctcaagctgctgctgagaatgcagggcttgctgctgcaccttttcaagcatcgcttgcaagtccaccacccgggacttctcctccttcagcttctgcagcagagcgtgatgggcctgtgtgtcctggtgcacgcaagcctcctgtgtcctctggctcagctgctcggtcaggagccgctcgtgccgcaaggcctctgacagctccagggtgcggctcttctcagccgcaaggtccttctggagctcagagagctggctccgctcctgagccagcaaggcctcgcagcgtgagtgctcgatacgcagctccttctgcaggttgtccttggccgtctgctcgtgtttcagtgccacgcagagtcgactgctctgagcacgctgtgtctccaaagacgcccgcagctcctccagggccttggcactctggctctccctctgcaggtgccgcagctgctcctcctccagctggctctgcagggcacgccccttcccctgctcactctccagctcctgaagcgcggccttcagctcgttctccttactgctcagcatggatctcagctggaggacctcctgctgcacctcgcagagggaccgggacagctgttcgctcttctgcctgctctcacagaggtcggacttcaaatctcgcactacagtctgctccgccgccaggagcttctgcacgctgtttgccttctcttgctcttcactcagcgtcttctgcaagtcaccagcaatgcacttctcctgctctactttataagccagcagttcaacctgcctgcgcagctggtgctcctgctggctcccgcgcgcctctgtgcttgtcagcgccgtgcgcaagtgctgcagcttctcctggttctgcaggtgcgtcatgcgcagctgggcacgcagcgcctggatctcggacagcaggctgctccggtccggcaagcgaagatgctccagggacttttcctgcaggtctccctgctcacggatgatcttctccagcctttcgagcagggagctgtgaccccccagatctgagccactgagtcggggctgcagctcaaccccctgcatctcctgctctttttcaaaggcctcttgcacaacctgcagaaggtcccctctccaatcggggcacgcggtgggcacttcctgcgtctttcccccatggagcgagatgtcctgtatctcgtcttccttccggggtgggtgtggctcgccgcttgggggtgcaaggccttctgacagcgccaggatctggtggctctcgtcacgcaccatctgcagtaaagccttcacgtgcttcggacgcacttccttctccttcatggcttccggcagcggctgaaaccttccagagatggaagcaggggtcacaggaccagcagtttgagcctcagggcctcctgaccccgggctcagtcttgctccaaaacccgagccgtcacttttctcacttctatcagcttttccttctaatccaggaggaggtgaacttaatgtttcttgagaatcaaaggatgttgtgataaaatcttcgacatctttctccacagccgtcctctgcacatggtggtcgtcagccggcggagactcggcccactgcagtgccagcgctgctgcagacacgcctggggaacaaagcagccccggcccctgggtctgtggcagcgaggtgtccgccctgtcccccagggatgtgtcggcactgcacaggctcagggctcctgagtggggtgtcacggggaggctgggccagggctccagggtccagtccttcctgaggacctcaggggagctccaggaagacaggtccagcatcccgaccgggctcttccggggcccagcctctgcagtgtggctctggtggcgggagccaccaagtacgctggtcggtgaagaaagagacctgtcctgacattctgatttttcttgaatgggagaatctggcatttcatctggtatcaaggaatcccaatttttgataacatcagttacaccccctggggttgtattggcatcacacgcgtctatggcctgatttttgataacatcagttacaccccccgtggctgtattggcatcacatgtgtctatgtggggtgatatgtcaggctcttctccgtcacaggaatcatcactccagctgctctccaacaggtgtgctgaggccatgggccacagagatttggtgtcggcagcatccacattctggaaggtcatggaatacagcaaacggttcagtttttcctgaagctgtttcacctgagctacgagatcgaccttcggcagctgacaatcttccagtactttttctttacccttgccgccgtcctccagactcaggcgcatttcatttttcaccaagagcagctccgactgcagctgcctctggcagacggtgagcactgacatcacgccttcttgcttgcagagaggtgcatccttcaacgtcaccaggacaggctgcagatcaccctgtgggtcagggacaaccggctccaaagcagcatcatgggaggcctccacgtcgccggtgacctgggccttggcgccaccatccatgcgaggctgtgggtgggccccgggcacccgtgtgtgagctgtggctctgcgggcctgccgcctgtccagctccacctggcacctcaggaaccgctggtgcagcacctgcagctggcggctgaggcgggcacactgcgctcggagccactgcagctcgggaggcgccgccccggctgccaggggctgctgctccagggcgcggcggatgcgggccaaggccaacaggacggcctccagctcggcagagtgggccgccttccgctggttcagagcgtcgatttctaaatttctctcggcaatcgtcgcttcctttgctttcagggccgcttcgaactcctggatccgggaggccatgtcttcgacctcagcctccctgagggctacattgcgctccagctcagccagctgtagctccgcagcctcctctgcgccctggaggcgctgctgcagggcctccagggcctggctgtgcctgcgctcctggtcagccagcagccggctcagggcctccttggcttccagcgcagcctcgagctcgccctgtagggcctgcccacgagggcccccggcctgggagcagagcagctcgctctgcagactgccagcctgactgtcgctgacttcgtgcaccacaggccccatgagggacannnnnnnnnnnnnnnnnnnnnnnnnnnnatggagttgttcaatttcctctgctttctccttttgtaatcgtttctgattctcttgcagattttcaatagtggctttcagctcttcaatctcagaacttctggtatatatgaccttcaagctcgtgttctcttcctcaagttctctgaggctgacagcagtctggctgttctgcatgtccaattttaagttcagatgtagtatttcttcatttttactttctaagtcacctttcatcttttctagctgttcttttaagtccaaaacctcgctctcgcgccgcaggagtgctctctgtgtcacctctaactgtatttctggaccctcaggagggctgcccgaaggaggctcgggacatctgcctgcatctagtgtagactgcaacgtggacgccagaagcaagctactcatctgctgtttctttaacacctctttatcctgttccagccctttcacgatgtttttctgtttttccacttcttcctggagctgggccacttttttcctgatgttgatgttcatctcctccagacgtttaatttcttcttcctgcattaacacttgtctatctgccgactctttctgtatagccaattcattaaattcatccaacttttctctcaacttttgttgtaacaactcaacctctccatccagcggcgcctgctggctgtcgcgagggccccagggctgcggcttggccgcctggcggagctgcccctccagcctctgaatctcctgctggaactcctcgcgctcgtgctcccgctcggctgcctgctcatccatgaattgccgctggttgcgcaaatgcttgtccagagatgccacctgctgttccagggcagtgacggcctccgcctgcttggcacacccgcgatgctgagacagctgttcttctaactcagactccaaaatcttcatctgggagagcagggctgagcggtccttctcagcctgcttcctggtctccgactgttctttggtcagatcctccacttccttccggagagcagcttctctggcctcggcgtccgtggctgtggcctccccccgactccacagacgggtgcactcctccctcagcgccgcctgctcctgggccgcctgctgcagctgccgtctcaggctctccagctccagcaccagacggtgctcggaatcctccttcccggccagcacctccttcagatctgctgtctccaccttgaatccctcaagggtaccctgagtcttgtgcagctccagcgccagctctgcctttgctgcgctctcctccttcaaacactccagcagctcctggtgcttcctgacaacctgtgctgtctcctcattcttaaaactaaattctttttcaaaacgagaatgaatttggcgtgcttcttccagctggctgctggagtccagggccatctccatgaggccgtccacggccaggctgaggctctggaagaccctccggatgggctgctcacactcccgcacactttctgggctcatgagaaagctttcacgcatgtggctgctaatttcagccacggaagacatctctgcacattcagacaaagttctgtccaactccgggagggccacatcagaccatgtctcctccagcgccggagctgtcgacagggccaggcctgcgcccgcgtcatccaggcagagccccacgcgctccccgatccggctcctcagggtgacggctgccctcagcgtctctccaaacaaacccagcagcctgcgcagggcgtcctggagggcccctctttcgctgtgggacaggttgacgtcggccttgagcatggagaggaggtttgcgccttcccggttctcccgctcccgcctctgctgcagcacctccaactcggagcggcactcttctatctcgtgacttaaggataaaacctggtctttcagctgctggacttggtgattcttcttttgaagctgcagagacaaagactctttctcctcttggtgaaaaggctgtgcctgtgcactctgaagccgaagtgtctcctctttttcatgcaaagcagttttcttttcacttccaaattcaccctggtgcactccctgcagctcgtgagccacggttccggcgagctctgtgctcgcttcggttcgcaggtggtcccgcacagactgtagctccccttcgtgtttccgcttcagtttctccaactcttgagtcaaaatcgtttggtgaagagagtcctttttccacagttgttcctcaaagtctgctcgtaagagctctagggcctgcctgtgctcctcacggatggtctgaaattcagacaggtaacaggattccaaagaatcaaggctggacagatgtctggtctccagagcgccgaggtcggcagcgtgttttgtctgcagttcggccacacgtgcagccagcagagccccctgcttgctctctaaggaggctgtcagctcgcccaacgcggcctggtgtctggcctcgagctccgccgtcactgacaggagctgctgctggtgtctctcctggaggagctgcagctcacgggcatgctgctcctgggcctcctgcaggaaggcatcttgttccgcactgaatttctcggtgatctctttacgttcctctaaaaacctgctccgggccagcatcagctgcagggcgcagtcttccttcacgtggagcgcggcaagctccccgtcctgggctgtgggcggctcccgcccacactggctgcaatgcagggcgtcgtctgaagtgaggtcctgttccagctgctgcaggcggccctgctgctccgtcaaggacctctccagatccaggatctgggctgcctgttggtcctgaagctgcctcatttcagcttctcgaagctcaaacttgtttatgatggtctgtttctcggattcagccttttctctcagttcaagtagcatcaatgttaacttctcctcagcttcccgctgtagctcctccttcataactttccagtccgtttcttttctttggaattcctgtttcatcagctcagtcttttgcttagcattatttagttccttctggtggtcttcaattagattgtgttttaccttctccaaatcgtccttcagacgagtttcatgctgcaacttctcatacaaatttctattttctatttttaggagttcaatttcttctttgagctcagtctgaagaagcgaaagttgcaccttgtgctcagtttccagacccaagactctggctgcccgctctgtgtcggcctccaagtccccgtcctgcacaccctggagatgcacccagggaagctcttggctgtgcccttcagagggttccagacgccactcgtgtcccaatgctgaagtctctacgcagcatctgtctgagacatgcccctcgtgctggatgcagaggggagactccagcgcttccagctggtgcctgtggctttcttctaactccgcctggaagcgtggcaggctctccttatgtcgctcaggctcgagttcatcaacgtgatcttttcttcctttctcaggtttctcttctaaacccacacaggacaacccaacttccacagagtccagaagagcatcttccctcgccccctgcagcctctgctgtaacagggttaggtcttcttggtaagttttctcagcatcccttaacttcttttcaaaataaatcctcagttgctccagttcggactcatgctgggttttttctcgctgcttcagctgttctaaatcttccacacgagaggtgcgcgccaggagttgctcatgtagctcactcaattcctgtctactggtcctggcagaatcaagctgggaccacaagcgcctgatctcttcttgtgattgtgccttcaggtcttcatatgatgcttgaagattctctaactccagctgtttttctttctcgctctctttgaacttgaactccaagtcttctaaacaccggccgtgctcggactgcaggtcttcacgtaacttctcaatggctgcttgatgatgactctccaggttcctaagggcccgttcagcctggtttttgtcttgaaaaatcttctccaactcagctctctgttctgccaattctttctgaaactggttttgtaaatcctccatttctgattgatgctttgcagacagttctttgcgtagattttctaaacataaatctttttcagattcccaatcttccttcagggtctttactatctgggcgtttttctccatttctgattgtaacttctccttcagctcagctgcttcctgtccacacctgagcaccacctcctccttctcccgtgcgtgctgctccctgaggagctccagctcgtgctgctgcctgctctgtagcagggccagctcctgggcacgccggctgttgagcatctcccgcagctccgtcaatgccgtctccttctccttctggaggttggcctgtgtcagctccagctgcgccgtgtgcatgttgctcagactnnnnnnnnnnnnnnnnnnttcaaggcccatgcacggcctgactctgatgcaggccagcctcatcttcacggccgctctccaggtcagtaatggcaagttcacattcttgttcacactcctttgtgaacatcccacgctgttctgctgggtggtcactgattgtgaagatcccacgctgttctggtgtgtggtcactgactgtgaacatcccacgctgttccggttggtggtcactgattgtgaacatcccacgctgttctggtgggtggtcactgactgtgaacatcccatgctgttctggtgggtggtcactgactgtgaacatcccacgctgttctggtgggtggtcaccgactgtgaacatcccatgctgttctggtgggtggtcactgactgtgaacatcccacactgctctggaggatggtcattgacttgcttctgctgcagctgttccaagtcctctctcttctctccatcacagtcctccggctgagctgcaaaggcccctcctgccccatcaggggtgtcgtcacatgatgtgcttttgcaaatgtcccctcctccacagagtgcgctgtcctccttggttaccggactctcctcctggacagacgcatcgacagccgagcccttcctcttcgccgtctttttctccgaatgcgaactgtcaccttttgtttttctctgtcggaagtgagcaagcttcgtcctcccggcctccacctttctgcgccgctgctcttgctcaacttccatctccctcagactccgcgcgggccgcccggcggtgacggggctgacacagagcagccttcgctctatttacactccctcccccgcgctt

SEQ ID NO: 7790 - DNA, 2194 bp, Homo sapiens
  misc_feature (169)..(183): n is a, c, g, or t
tggaaacagctgatctatatgctaccaaggtacagagcaaggaaactgaagtgtggtttttaccaatattattaaagagagaacaagactaaatggctttttagatttctctgtggccaagcaagagatacctcacagcttctatatcagccatgaagcattagggatnnnnnnnnnnnnnnnttcatgaaattgctcctgtcactagcaaaatccttaatggaacactctcaaaagtagcaattggtgggatagtcagaagaggcttttcaacatttaggaaggtggcacgtaccacctcctactaacctgggataaagatggtagctacttttattcctttataagttagtaatattataagagcagtagacacctatctgccatggatggcctagccctattttaaaggatccaggtcaataagtgtcgaaactgtaagaagtaactttcctatgtacacctaaaataaaatataatttaaatgtgcaaaatctgttagtgaagattacaaacttttaattctttttgaggataactttacaggagtaaccttataggacagaggttaacataggctttggaaacagataaacctgagcctactcaccagctgtgtgactttgagcaagttatcgaacctctcaaagcctcaattttctcatctgtaaaattaagataatagaacgtatctcataagaattgttatgaagattaagtggataatgcatgtaagatgtttatcccagtctctagctaaaagcaagcattcagtaaatgctggccacaactactgttattagtttaatattattacaatgtatggttttttgacttagcctgaacagtgattcatagagggaagaatacttgtgttgtatataaatttatattttgctgaaaactatgttttgtgtttgttttcccccaggagagaatagaatactccaaaaccttcaaggggaaatattttaattttcttggttactttttctctatttactgtgtttggaaaattttcatggctaccatcaatattgtttttgatcgagttgggaaaacggatcctgtcacaagaggcattgagatcactgtgaattatctgggaatccaatttgatgtgaagttttggtcccaacacatttccttcattcttgttggaataatcatcgtcacatccatcagaggattgctgatcactcttaccaagttcttttatgccatctctagcagtaagtcctccaatgtcattgtcctgctattagcacagataatgggcatgtactttgtctcctctgtgctgctgatccgaatgagtatgcctttagaataccgcaccataatcactgaagtccttggagaactgcagttcaacttctatcaccgttggtttgatgtgatcttcctggtcagcgctctctctagcatactcttcctctatttggctcacaaacaggcaccagagaagcaaatggcaccttgaacttaagcctactacagactgttagaggccagtggtttcaaaatttagatataagaggggggaaaaatggaaccagggcctgacattttataaacaaacaaaatgctatggtagcatttttcaccttcatagcatactccttccccgtcaggtgatactatgaccatgagtagcatcagccagaacatgagagggagaactaactcaagacaatactcagcagagagcatcccgtgtggatatgaggctggtgtagaggcggagaggagccaagaaactaaaggtgaaaaatacactggaactctggggcaagacatgtctatggtagctgagccaaacacgtaggatttccgttttaaggttcacatggaaaaggttatagctttgccttgagattgactcattaaaatcagagactgtaacaaaaaaaaaaaaaaaaaaaaaaaaaaaaaaaaaagaaaaaaaaaaagaaaaaaaaaaacaaaaaggagacactagaacaagaaatacaagaaagagaaaaaaataaaaaaaaaaacctcgggggggggcccggtccccaatggcccctatggggggtcgtatcaaaatccatgggccggcttttacaaaggtcgaaccgggaaaaccctggtgtgcccaacttaagtcgcttggaatccccttttcgcaagttggcttattaccaggaaattgtggccggtttttggt

SEQ ID NO: 7791 - DNA, 2509 bp, Homo sapiens
agaatcgctggggtggcagagccgccagcgaggctggggatgggggcgccgctgctctctcccggctggggagccggggctgccggccggcgctggtggatgctgctggcgcccctgctgccggcgctgctgctggtgcggcccgcgggggccctggtggaggggctctactgcggcacgcgggactgctacgaggtgctgggcgtgagccgctcggcgggcaaggcggagatcgcgcgggcctaccgccagctggcccggcgctaccaccctgaccgctaccggccccagcccggagacgagggccccgggcggacgccgcagagcgccgaggaggctttcctgctggtggcaaccgcctacgagacactcaagtcctcctgcatatgcccaagaggattgggagtggaatggacaccagcagaagcaccacagttattcctgtagagattagaaacaaggagcttattgccctgcttgtcaaggctcaggacagacaggaggaagaaacaagtataaaggttttggttttggaaagaagttggaatctccagaccctgggaccttaagatccacaaaattgctgaaagaaaaagtactaccttattgaaaggatgaagaaacacgaaaagattatgattacatgctggatcatccagaagagtactacagccattactaccactactatagcaggcgcttggcccctaaggtggatgttagagtagtgattttggtcagcgtgtgtgctatttcggtgtttcagtttttcagctggtggaatagctacaataaggcaatcagctacctagccacagtgcccaagtaccgtatccaagctacagagattgccaagcagcagggactgctcaaaaaagccaaagaaaaaggcaaaaacaaaaagtccaaagaagaaattcgtgacgaggaggagaacatcataaagaacattataaaaagtaaaatagatataaagggtggctatcagaaaccccaaatctgtgatcttctcctgtttcaaattatcttagctccttttcacctatgctcatatatagtttggtattgtcggtggatctataattttaacatcaaaggcaaagaatatggagaggaagagagattatacattatacgtaaatctatgaagatgtcaaagtctcaatttgatagtctagaagatcatcagaaagaaacttttcttaaacgagagctctggatcaaggagaattatgaggtctacaagcaagaacaagaggaagaattaaagaaaaagttggcaaatgaccccagatggaagagatacaggagatggatgaagaatgaagggcctgggcggttaacatttgtggatgactgaagattgatggaatgctactatgccaaaccttaattgtgatattattttcataactgaattattttagaaatgtatcaattgactgctgctcagcagtaactaaaattcctcaagtatttgattaaacagaataatgtcaaaatttaaaccttcccttaaaactttatacataagacatttatgattgttcaatttttataatctatttgtggattttgttaaaagatttcacatgaagatttattagttgccatttaaaatttttatatgtttagttaaaagatttgacatgaaaatttattagataccatttaaaaattttatgtgttatgtgtttattctttgagaatgttaccttactgtttgtaatagtgctacatttttctgctttcatggcctctgtattttcacaaaacaccaaaaacagcatttaattatattatcatgagtgtgtttctggacacaaacttctgcagtagaatgacctaacatgtcgttttcattgcagtcattataggattgaaatacgttcaaaataacctctctaggaaagtcttctgctagaatttctcccctctattcattataatattctttgtttttaaagccagtcaaatataatagtcttaataagatcagaaactctccaggagagtgagtctaccctcacgtccttgtaggatgatcttgattatagtcttattataggactataactgtattctcaacatttctccagaaaggaccttgtaaaaaggtcttttgtaccacagtattggttttttcccctctctcttcacttaaaaaaaaaaatagcaaggcagaaatagtgtattgaaaagttgttcatctattatgaagtccttgagtggtgaaaaatccgttgtacatgagaacatttctatgcatttaagccagaaacgaggtacatggctgtgtgctcttctgtcaaccaatgaaatgtgttttcacatgtgtggcagtgcaagtaaataacacattatttgactgaatcaggcatgatactgcaccaaagtgttggtacatattcacggtagtaaatcagtacccctgttaaaggatttatcccattgcttcatattaataaaatggttacaatatatcacaaaaaaaaaaaaaaaaaaaaaa

SEQ ID NO: 7792 - DNA, 1157 bp, Homo sapiens
  misc_feature (172)..(187): n is a, c, g, or t
  misc_feature (361)..(361): n is a, c, g, or t
  misc_feature (457)..(457): n is a, c, g, or t
gtgcagaatattcacgatatacaaagggagtatcccaaaaaggttaagacttactttataaaggtttaaagccaaaagagtaattgttgcgggtgggatactttccacttgagcaagagtgtcttaccaagtaaaagaataaggctggaaggcttcaatgcccttgtgtaannnnnnnnnnnnnnnngtaacgcattcacacaatttagttgataggaaaactttttgtggagaatagtttcctaaggacgttgcaaggtcaaacgaacacactggttcttagattggtacttcacatcctttactggtcagctatctgttaatcacagataagactgtgcaaggacgtcaatccgtatcntacgagaggctcacaagcttgcaatggtctgaccaaaaggtactgagcatcgcactaccggaagaagcctgaacactgctagggcagcttcgtgcngaattcagcacgagctcgagtttttttgtatttgctaggaatagccacactgattgttcatttctttaatttttaaaaatgagtaagcagacaatcttgcaccctttgaatgcccaataaaaatgttcattatgcaaaacagtacaacctttttcattttttaataatactgtaaatatctcagaaaggatgtattgtttctaatgaatatcaaaaaagtcatcacaatgacatgttcccctgcccccacattgccctccccacccccaaagttacccaaatactagtaggaaattacaaaaaacaaaaagcaacaatccaccctccgccctgccccatgagtagtgttaagtgagtcaagcgttagccacattacgacgtgtgtgtgtgtcggcgatggcggaccacagggatctgtgcatccgtgagagttggtgtggagaaccggtagcagcagcagtgggaagcctccttgcctggggcctgctgggaagacagcagccgaggataaacacaagcagggccccagcctggcccttcctgggtccgcagaaccagacagctcagggagacgagagtgggatggtggcttgcccataagaagctgggcaggcctgaactgtgtgcacagagggggcccaggctaggcttcccgtcctgcccagtggggcactgggcatccctcttagtagacacaggc

SEQ ID NO: 7793 - DNA, 5010 bp, Homo sapiens
  misc_feature (2753)..(2768): n is a, c, g, or t
ttatcatccttctttaattgatattcaggtcaccctacattatatcgcttttgtgcccacagcagcacagtggccgaaggtccttaagaaatgcttcacataatgtcacctagggtttaaggtccttaagaaatggttaacataatgtcactagggtttaaggtccttaagacatcggttaacataatgtcactagggtctctctcctaggtcatattagtttagagaccataatcacgtgaatgtagttggaattacttcttacccaatgagaacattttcaacatactctcttcagtagtctacttacagcagtgattctcagggtgcagtggagggggtgacagaaaaatcaaggttttggctgggcatggtggctcacacctgtaatcccagcaccttgggaggccgaggtgggaggatcacttcagtccaggacttccaggacagcttgagcaacacagtgagacctcgtcttcaacaggtttcccgtgcataggagatccaagacagcagaaggcaggagctggcgggacagggaggaagagcggctctgccgtttactatctgtgtgacgctgagcacaggagggatggactcctggactctccagctacctgcgtggtcctccccggtgtgaggacagaagaccggtcctggaccgggcccgcatccagccctaccgccggtgtctgaggtgagggctccgtcagcggaaaacgctcgacaacggaggggcaggcagggccgggggcgtggtcaacgcgggccccgccccccgggctctacccccgagcgtacgcgcgcgcctgaagcagccaaccaggaagcgcagagcaggttcaaacacagacggcgggtgaacatggcgtcctcgacttggtctgagacgtgataggcctgccttctggttgaagatgtggcgagtgaaaaaactgagcctcagcctgtcgccttcgccccagacgggaaaaccatctatgagaactcctctccgtgaacttaccctgcagcccggtgccctcaccacctctggaaaaagatcccccgcttgctcctcgctgaccccatcactgtgcaagctggggctgcaggaaggcagcaacaactcatctccagtggattttgtaaataacaagaggacagacttatcttcagaacatttcagtcattcctcaaagtggctagaaacttgtcagcatgaatcagatgagcagcctctagatccaattccccaaattagctctactcctaaaacgtctgaggaagcagtagacccactgggcaattatatggttaaaaccatcgtccttgtaccatctccactggggcagcaacaagacatgatatttgaggcccgtttagataccatggcagagacaaacagcatatctttaaatggacctttgagaacagacgatctggtgagagaggaggtggcaccctgcatgggagacaggttttcagaagttgctgctgtatctgagaaacctatctttcaggaatctccgtcccatctcttagaggagtctccaccaaatccctgttctgaacaactacattgctccaaggaaagcctgagcagtagaactgaggctgtgcgtgaggacttagtaccttctgaaagtaacgccttcttgccttcctctgttctctggctttccccttcaactgccttggcagcagatttccgtgtcaatcatgtggacccagaggaggaaattgtagagcatggagctatggaggaaagagaaatgaggtttcccacacatcctaaggagtctgaaacagaagatcaagcacttgtctcaagtgtggaagatattctgtccacatgcctgacaccaaatctagtagaaatggaatcccaagaagctccaggcccagcagtagaagatgttggtaggattcttggctctgatacagagtcttggatgtccctggcctgggctggacacaaggtgtaaatacctccgtcatgctggaaaatctccgccaaagcttatcccttccctcgatgcttcgggatgctgcaattggcactacccctttctctacttgctcggtggggacttggtttactccttcagcaccacaggaaaagagtacaaacacatcccagacaggcctggttggcaccaagcacagtacttctgagacagagcagctcctgtgtggccggcctccagatctgactgccttgtctcgacatgacttggaagataacctgctgagctctcttgtcattgtggagtttctctcccgccagcttcgggactggaagagccagctggctgtccctcacccagaaacccaggacagtagcacacagactgacacatctcacagtgggataactaataaacttcagcatcttaaggagagccatgagatgggacaggccctacagcaggccagaaatgtcatgcaatcatgggtgcttatctctaaagagctgatatccttgcttcacctatccctgttgcatttagaagaagataagactactgtgagtcaggagtctcggcgtgcagaaacattggtctgttgctgttttgatttgctgaagaaattgagggcaaagctccagagcctcaaagcagaaagggaggaggcaaggcacagagaggaaatggctctcagaggcaaggatgcggcagagatagtgttggaggctttctgtgcacacgccagccagcgcatcagccagctggaacaggacctagcatccatgcgggaattcagaggccttnnnnnnnnnnnnnnnncccaactggtagggcttcatgccaagcaagaagagctggttcagcagacagtgagtcttacttctaccttgcaacaagactggaggtccatgcaactggattatacaacatggacagctttgctgagtcggtcccgacaactcacagagaaactcacagtcaagagccagcaagccctgcaggaacgtgatgtggcaattgaggaaaagcaggaggtttctagggtgctggaacaagtctctgcccagttagaggagtgcaaaggccaaacagaacaactggagttggaaaacagtcgtctagcaacagatctccgggctcagttgcagattctggccaacatggacagccagctaaaagagctacagagtcagcatacccattgtgcccaggacctggctatgaaggatgagttactctgccagcttacccagagcaatgaggagcaggctgctcaatgcgtaaaggaagagatggcactaaaacacatgcaggcagaactgcagcagcaacaagctgtcctggccaaagaggtgcgggacctgaaagagaccttggagtttgcagaccaggagaatcaggttgctcacctggagctgggtcaggttgagtgtcaattggaaaaccaccactgggaagtgctccgggagcgcagcttgcagtgtgagaacctcaaggacactgtagagaacctaacggctaaactggccagcaccatagcagataaccaggagcaagatctggagaaaacacggcagtactctcaaaagctagggctgctgactgagcaactacagagcctgactctctttctacagacaaaactaaaggagaagactgaacaagagacccttctgctgagtacagcctgtcctcccacccaggaacaccctctgcctaatgacaggaccttcctgggaagcatcttgacagcagtggcagatgaagagccagaatcaactcctgtgcccttgcttggaagtgacaagagtgctttcacccgagtagcatcaatggtttcccttcagcccgcagagaccccaggcatggaggagagcctggcagaaatgagtattatgactactgagcttcagagtctttgttccctgctacaagagtctaaagaagaagccatcaggactctgcagcgaaaaatttgtgagctgcaagctaggctgcaggcccaggaagaacagcatcaggaagtccagaaggcaaaagaagcagacatagagaagctgaaccaggccttgtgcttgcgctacaagaatgaaaaggagctccaggaagtgatacagcagcagaatgagaagatcctagaacagatagacaagagtggcgagctcataagccttagagaggaggtgacccaccttacccgctcacttcggcgtgcggagacagagaccaaagtgctccaggaggccctggcaggccagctggactccaactgccagcctatggccaccaattggatccaggagaaagtgtggctctctcaggaggtggacaaactgagagtgatgttcctggagatgaaaaatgagaaggaaaaactcatgatcaagttccagagccatagaaatatcctagaggagaaccttcggcgctctgacaaggagttagaaaaactagatgacattgttcagcatatttataagaccctgctctctattccagaggtggtgaggggatgcaaagaactacagggattgctggaatttctgagctaagaaactgaaagccagaatctgcttcacctctttttacctgcaatacccccttaccccaataccaagaccaactggcatagagccaactgagataaatgctatttaaataaagtgtatttaatgaaaaaaaaaaaaaaaaaaaaaaaaaaaaaaaaaaaaaaaaaaaaaaaaaaaaaaaaaacaagaaaaaaacacacaaaggagacgaaaaaagaagcgggggggcggccccgaaaaaatactccacgccgagggggggggcccacaaaacaaagtaggagcaccaccctgatgtgtatgatagaaacagcggggggccgcccaataagagaaggggagtctataattatgaaaaaaaacaagggcgggcgcggcagggttaaaaacaaggaagcgagacggggtaggaaacaagaaggggcgcgcagcagtagtgctcggcgagaaaagcaaacccacacactagtaggggggggagcaaacaagctatgggaagacagccccccgag

SEQ ID NO: 7794 - DNA, 3310 bp, Homo sapiens
ggagactggcctcctccgtcgcccgcgctcccacctaccccggcagcctgcctttggtccgcgcttgcgggccaggcttctcaggctcgaggggttggaggaccgttgatcggaaggggcctgctatagagtgaacgggattttgctttttcatcagtttcaggggagggtatgttggagtcggaaaaaaaaaagttttacggggccaccgctcgctttcgtacacgctaagaagcgttttcacttagcacaagcacggatctctgcgcgtcagggcaagctgtgagggagccggtgaagcttatgaccgacaggatgagaggaggacctgaatgaggctacagccgtgcagggaagaattaagtctgtttcttaacaccagggcttcacatgtgccagaagttagaaaatattagggacttgccgtgagtttcgatcttctcagctcaggccctagtagaataaggaaggtgtaaagctggagaagagaaagtgcagaggtgttagggacaaaaactcagccctcgactgtccataaggagagtggcctttcagtggacacgatcctcatcagtcgggaatgctgctgaaggggagatgcaaatgtagagaacttgaattcctacagatgagcatttcgaacccacaacatgtttattgttagatactagttggcacaacatgaatatacgctttccaaaaggtagaaagtatctcctttacacaatcattcagtaaggcttcattgagcacctgcttgggacatagtccgtttccttctgcttagttcacacctgtcatgtcttcctgtgatgagcaaacactgagcaagtgtcaagcaccacacatggggatatagacgcaacagagggcccagttaattgctctcgctcttttggagagaattacagtgcacagtgggaaatattggagagatactttggaataataggagactattactttgaagtcagacctgaagtccattatctacttgaccaattagtaggacaacaatctcactgaacccgttttctcatatggaaataagataaaacttgaagagtgaacatcgcgtggagctgggcaagaagtaggaagatcatgtattattctcgagttcaaaggaagaaaaataatgctcgactgtgggatccaccctggcctagaaggaatggatgctcttccttatattgatttaattgacccagctgagattgatctcctattaattagtcatttccatttggatcactgtggagctctgccctggtttctacagaagacaagtttcaaaggaagaacatttatgactcatgccacaaaagctatttatagatggcttctttctgattatgtcaaagttagtaacatatcagcagacgacatgctgtataccgagacagatttggaagaaagcatggacaaaattgaaactatcaactttcatgaagttaaggaagttgcgggaatcaagttttggtgttaccatgcaggtcacgtcctaggagccgccatgttcatgattgagatcgcaggcgtgaagcttttgtacactggtgatttctcaagacaagaagataggcacttaatggcagctgaaattcctaatattaagcctgatattcttatcattgaatctacttatgggacccatatccatgagaaacgtgaagagcgagaagcaagattctgtaacactgtccacgatattgtaaacagaggaggcaggggtctcattcctgtctttgctcttggaagggctcaggagctgctcttgattctagatgagtactggcagaatcacccagaactacatgacattccaatatactatgcatcatctttggccaagaagtgtatggcagtgtaccagacatatgtaaatgccatgaatgacaaaatccgcaaacagatcaacatcaataatccctttgttttcaaacacattagtaacctcaagagcatggatcattttgatgacattggtcccagtgttgtaatggcctccccaggcatgatgcaaagtggcttatccagagaattatttgaaagctggtgtactgataagaggaatggtgtcattatagcgggatactgtgtagaagggacacttgccaagcacatcatgtctgaacctgaagaaatcactactatgtctggacagaagttaccactgaaaatgtctgttgattacatttctttctcagctcacacggattaccagcaaaccagtgaatttattcgtgctttgaaaccgcctcatgtgattttagtccatggagaacagaatgaaatggccagattgaaagcagcactgattcgagaatatgaagataacgatgaagttcacatagaggttcataatcctcggaatacagaagcagtgaccttaaacttcagaggagaaaaactagccaaggttatgggatttttagcagacaaaaaaccagaacaaggccagcgggtctcaggaatacttgttaaaagaaactttaattatcacatactttctccttgcgacctgtccaattatactgacctggccatgagcacggtgaagcagacccaagccattccatatactggtccctttaatttgctctgttaccagctgcagaaattgacaggtgatgtggaagaattagaaattcaagaaaaacctgctctgaaagtgttcaaaaatattactgtaatacaagaaccaggcatggtggtattagaatggctggcaaacccttctaatgatatgtatgcagatacagtaacaactgtgatattggaagttcagtcaaatcccaaaataagaaaaggtgcagtacagaaggtttctaaaaaattagaaatgcacgtttacagcaagaggttggagatcatgctccaggacatatttggagaagactgtgtaagtgtaaaggatgactctattcttagcgtcacagtggacgggaaaactgccaaccttaacttggagacacggactgtagaatgtgaagagggaagtgaagacgatgaatccctccgagaaatggtggagctggctgcacagagactgtacgaggccctgacgccagttcactgagactgtgcctgtatatgaactttgaaaaaatacttgactctacttttgttacctaaaataaaatgcattcgtttctctgggaaaaaaaaaaaaaaaaaaaaaaaaaaaaaaaaaaaaaaaaaaaaaaaaaaaaaaaaaaagaaaagcaaacaaacagaaaagagcaaaaaaatcacaaacaaacaagacagaaaaataaacgaagtcaacaaaagaaaacactagggg

SEQ ID NO: 7795 - DNA, 2963 bp, Homo sapiens
ggtctggatccagctgctgttccaggagagcaaccctggggtgcactacgagtacaccatccacagggaggcaggtggccacgacgaggtcccgccgcccgtgttctcctggcattatgggccctggaccaagtgcacagtcacctgcggcagaggtgtgcagaggcagaatgtgtactgcttggagcggcaggcagggcccgtggacgaggagcactgtgaccccctgggccggcctgatgaccaacagaggaagtgcagcgagcagccctgccctgccaggtggtgggcaggtgagtggcagctgtgctccagctcctgcgggcctgggggcctctcccgccgggccgtgctctgcatccgcagcgtggggctggatgagcagagcgccctggagccacccgcctgtgaacaccttccccggccccctactgaaaccccttgcaaccgccatgtaccctgtccggccacctgggctgtggggaactggtctcagtgctcagtgacatgtggggagggcactcagcgccgaaatgtcctctgcaccaatgacaccggtgtcccctgtgacgaggcccagcagccagccagcgaagtcacctgctctctgccactctgtcggtggcccctgggcacactgggccctgaaggctcaggcagcggctcctccagccacgagctcttcaacgaggctgacttcatcccgcaccacctggccccacgcccttcacccgcctcatcacccaagccaggcaccatgggcaacgccattgaggaggaggctccagagctggacctgccggggcccgtgtttgtggacgacttctactacgactacaatttcatcaatttccacgaggatctgtcctacgggccctctgaggagcccgatctagacctggcggggacaggggaccggacacccccaccacacagccgtcctgctgcgccctccacgggtagccctgtgcctgccacagagcctcctgcagccaaggaggagggggtactgggaccttggtccccgagcccttggcctagccaggccggccgctccccacccccaccctcagagcagacccctgggaaccctttgatcaatttcctgcctgaggaagacacccccataggggccccagatcttgggctccccagcctgtcctggcccagggtttccactgatggcctgcagacacctgccacccctgagagccaaaatgatttcccagttggcaaggacagccagagccagctgccccctccatggcgggacaggaccaatgaggttttcaaggatgatgaggaacccaagggccgcggagcaccccacctgcccccgagacccagctccacgctgccccctttgtcccctgttggcagcacccactcctctcctagtcctgacgtggcggagctgtggacaggaggcacagtggcctgggagccagctctggagggtggcctggggcctgtggacagtgaactgtggcccactgttggggtggcttctctccttcctcctcccatagcccctctgccagagatgaaggtcagggacagttccctggagccggggactccctccttcccagccccaggaccaggctcatgggacctgcagactgtggcagtgtgggggaccttcctccccacaaccctgactggcctcgggcacatgcctgagcctgccctgaacccaggacccaagggtcagcctgagtccctcagccctgaggtgcccctgagctctaggctgctgtccacaccagcttgggacagccccgccaacagccacagagtccctgagacccagccgctggctcccagcctggctgaagcggggccccccgcggacccgttggttgtcaggaacgccagctggcaagcgggaaactggagcgagtgctctaccacctgtggcctgggtgcggtctggaggccggtgcgctgtagctccggccgggatgaggactgcgcccccgctggccggccccagcctgcccgccgctgccacctgcggccctgtgccacctggcactcaggcaactggagtaagtgctcccgcagctgcggcggaggttcctcagtgcgggacgtgcagtgtgtggacacacgggacctccggccactgcggcccttccattgtcagcccgggcctgccaagccgcctgcgcaccggccctgcggggcccagccctgcctcagctggtacacatcttcctggagggagtgctccgaggcctgtggcggtggtgagcagcagcgtctagtgacctgcccggagccaggcctctgcgaggaggcgctgagacccaacaccacccggccctgcaacacccacccctgcacgcagtgggtggtggggccctggggccagtgctcagccccctgtggtggtggtgtccagcggcgcctggtcaagtgtgtcaacacccagacagggctgcccgaggaagacagtgaccagtgtggccacgaggcctggcctgagagctcccggccgtgtggcaccgaggattgtgagcccgtcgagcctccccgctgtgagcgggaccgcctgtccttcgggttctgcgagacgctgcgcctactgggccgctgccagctgcccaccatccgcacccagtgctgccgctcgtgctctccgcccagccacggcgccccctcccgaggccatcagcgggttgcccgccgctgactgtgccaggatgcacagaccgaccgacagacctcagtgcccaccacgggctgtggcggagctcccgccccctgcgccctaatggtgctaaccccctctcactacccagcagcaggctggggacctcctccccctcaaaaaaggtatttttttattctaacagtttgtgtaacatttattatgattttacataaatgagcatctaccattccaaaaaaaaaaaaaaaaaaaaaaaaaaaaaaaaaaaaaaaaaaaaaaaaaaaaa

SEQ ID NO: 7796 - DNA, 4244 bp, Homo sapiens
  misc_feature (382)..(398): n is a, c, g, or t
  misc_feature (1753)..(1768): n is a, c, g, or t
tcagacgctgaactatgtggggatgagctgggtgctctgtggatgtgtatagttttaaacccccactgcaagttggagcaaaaggccagttggctaaaacagctgaagaaatggaatagtgttgatgtctgtccatgggaagatggaaatcatggcagtgaattacccaacttaaccaatgctctgcctcagggtgcaaatgccaaccaagattcatcgaacaggccacatcggacagtgttcacccgagccatcgaggcatgcgatctccactggcaggatagccacttgcagcacattatcagcagtgacctatacaccaactactgttaccatgacgacactgaaaactccctcttcgactcccgcgggtggcccctcnnnnnnnnnnnnnnnnntacagcctgtgcaagagtggacgcattacgttctcatgggtaccccagagaagcactgagactagcaatagctattgttaatacattaagacgacagcagcagaaacagttggaaatgttccgaacccaaaaaaaagagctaccccataaaaacataacctcgataaccaatctggagggctgggttggacatcccctggaccctgtgggcactctcttcagtagccttatggaagcctgccgcattgatgatgagaacctctctgggttctcagattttacagagaatatgggacagtgcaagtctctggaataccagcatctacctgcacacaaattcttagaagaaggggaatcctatttaacgctggctgtggaagtagccctgatagggctaggacagcagcgtatcatgcctgatgggctgtacacacaagagaaagtttgccggaatgaggagcagctcatttctaagcttcaggaaattgaattggatgacacactggtgaaaatttttcgcaagcaagcagtcttcctattagaagccggaccatatagtggtttaggtgaaataatccatcgggagagcgttccaatgcacacatttgccaagtatctcttcacctctctcctacctcacgatgctgaattggcatacaaaattgcactgagagcaatgcggttactagtattggaatctactgctccatcaggagacctcacccgcccacaccacattgcatcagttgttcccaaccgctaccctcgctggttcactctaagccacattgagtcccagcagtgtgagctggcatccaccatgctaactgcagccaaaggcgatgttcggaggctggaaacagtattagaatccatccagaaaaacattcactcctcatcacacatcttcaagcttgcccaagatgcatttaaaatagcaactctcatggacagtttgccagacatcactcttttgaaagtgtctctggagctgggcctgcaggttatgcgaatgacactgtcaaccttaaattggcgacggcgggagatggtgaggtggctggtaacgtgtgctactgaagtcggggtttatgccctggacagcatcatgcagacctggtttacactctttactcccaccgaggccacaagtatagttgcaactaccgtgatgtccaacagcaccatcgtccgcctccacctggactgccaccagcaggaaaagctggccagcagcgcccggacacttgcactgcagtgtgccatgaaggatccacagaactgtgccctctctgcgctaaccctttgtgaaaaggatcacatagcttttgagacggcgtaccaaattgttctcnnnnnnnnnnnnnnnngcatgagctatacacagctctttacaatagcacggtacatggagcaccgcgggtaccccatgagggcctacaagctggccaccctggccatgacccatctcaacctgagctacaatcaggacacacaccctgccattaatgatgttttgtgggcctgtgcgcttagccactcccttggtaaaaatgagcttgcagctataatacctctggtggtcaagagtgtcaagtgtgcaacggtactgtcagacattttgcgcagatgcactctgaccactcctggcatggtgggacttcatgggaggaggaactctggtaagctcatgtcactggacaaagcccccttgaggcaactcttggatgccacgatcggggcctacatcaacacaacgcactcacggctcacacacatcagtcctcggcactatagtgagtttatagagttcctcagcaaagcccgagagaccttcttaatggcgcatgatggacacattcagtttacacagtttattgacaacctgaaacaaatctacaaaggcaaaaagaaactgatgatgttggttcgggagaggtttggttgatagatcttgtatgaatggggtggggggtggggatgggagggatggtttgtttttacttgagcctgcctttgtaccctttttaacttaaagaacagagccacaccggtattatatgtgtatagttatattgcgtttgcagactaaattgtcatgttgtgaaagtttgtgtgttttttattttttccctatttctttctttcctttattttattattttttttaattttttttttctggttttgtatgagagagaggttaaaaaggtttggtttacactgagtatatgttgtcaagtggcaaaagtccacatagctctcctgttttctgtatacgttcacagcctcaaaaaaaataattgaaatggctttaaaaaccaaacaaaacacctccatcctgtgataagtacctcgaatggattcagctttactcctttgtaactcatctttacattttcagcatatttaaacaaaccaacaaaatgaaatactaatagtaaaaaggctgacccatgtggctttgcagtgctgttcgtccagaagcatggcacacgatgcttgtgcatgtggaaacttagcgactgtcaacatacattctcagggatttatccaaaaaaattaaaaaaagaatgagagcatttattgtactgtatatatattatagtatatgtctgaatattgaaaatataacattaactaatttataaaaaatattctatgtaatgcaaaatacttgaagctgcagtagcttggttttaaacaaaaacaaaaaaaaaactgagagaaaacctatcagaaggactaaaagtacgccttgcttcagggttggctcaggtggtgaacttcatgctgggcatctatgcagagccaccttttggattgcatggttggactgagatctattgggagaaattatatatgtatatatatttatacaacttatgtatacatatatatatgtatacacacagacacacacacacaccaccaacaaccaccactacaccacacatgcttataacaggcactagaataaagagggacaacaaaatacacagccagagcagcaagccttagcattaagaatatacaatatgccggaattggggttcgtgcctcctagcctaggaaacttaaaagaaatatccttttgacacaaaacacaaaatgttttccaaaacaattgacataatgatacattacgcctttgcagtgagctaataataagctaacctttgtgcacaaataacattatatatattatatatctattctgcataggtattttgactttgtgcaggacagaaagttgtgtaggtatgactgttctacttttcagttttctttttttttaatatattttattttctctagaaattactcaaacaaaagcagccttctatcttgccttgtcttaatgctttaaaataaccaaactggagatctaactaccaaactgttcattatattattaaataccaactttggttacagtatagtgtctttactttagctgatggttctgtaaccttgtgctttttaaagcaatttttatgttttggtgcaaaagttgtccagtgtctcttgttcccttcactagagaacatgcttagaggtatgtttgtaggtatttttgtttagaagaactatttcatgcgctccattttatttattataataggtaaaaagaaaaaaaaaggttgtaattcatcacccatgtaaacatgctcatgaagttgaaagtaattaagatttgatacactgatatcaatttatttatgtaactaaatcactgttttataaacttgttaatgatcaacaatttttgttttgattaaaattagttttttgaaagttgaaaaaaaaaaaaaaaaaaaaaaaaaaaaaataaaacaaaaaggg

SEQ ID NO: 7797 - DNA, 1174 bp, Homo sapiens
  misc_feature (814)..(1172): n is a, c, g, or t
ccggcacgagaggagttgtgagtttccaagccccagctcactctgaccacttctctgcctgcccagcatcatgaagggccttgcagctgccctccttgtcctcgtctgcaccatggccctctgctcctgtgcacaagttggtaccaacaaagagctctgctgcctcgtctatacctcctggcagattccacaaaagttcatagttgactattctgaaaccagcccccagtgccccaagccaggtgtcatcctcctaaccaagagaggccggcagatctgtgctgaccccaataagaagtgggtccagaaatacatcagcgacctgaagctgaatgcctgaggggcctggaagctgcgagggcccagtgaacttggtgggcccaggagggaacaggagcctgagccagggcaatggccctgccaccctggaggccacctcttctaagagtcccatctgctatgcccagccacattaactaactttaatcttagtttatgcatcatatttcattttgaaattgatttctattgttgagctgcattatgaaattagtattttctctgacatctcatgacattgtctttatcatcctttcccctttcccttcaactcttcgtacattcaatgcatggatcaatcagtgtgattagctttctcagcagacattgtgccatatgtatcaaatgacaaatctttattgaatggttttgctcagcaccaccttttaatatattggcagtacttattatataaaaggtaaaccagcattctcactgtgaaaaaaaaaaaaaaaaaaaaaaaaccttgtcggcnnnnnnnnnnnnnnnnnnnnnnnnnnnnnnnnnnnnnnnnnnnnnnnnnnnnnnnnnnnnnnnnnnnnnnnnnnnnnnnnnnnnnnnnnnnnnnnnnnnnnnnnnnnnnnnnnnnnnnnnnnnnnnnnnnnnnnnnnnnnnnnnnnnnnnnnnnnnnnnnnnnnnnnnnnnnnnnnnnnnnnnnnnnnnnnnnnnnnnnnnnnnnnnnnnnnnnnnnnnnnnnnnnnnnnnnnnnnnnnnnnnnnnnnnnnnnnnnnnnnnnnnnnnnnnnnnnnnnnnnnnnnnnnnnnnnnnnnnnnnnnnnnnnnnnnnnnnnnnnnnnnnnnnnnnnnnnnnnnnnnnnnnnnnnnnnnnnnnnntc

SEQ ID NO: 7798 - DNA, 993 bp, Homo sapiens
  misc_feature (9)..(9): n is a, c, g, or t
cattccccngtgggaccggaaaattctttcaaaggtccacaccaacattttaaagaaaccaaaagggaggggataatggaatctagaattgtccatatatatttgtttacttgtgcaatgctaatatagtaactcggctgtcctttgaatatcactgtgttgagtagattcctctaggacctttgatttcatgagttgggcccaaaccgtggtggaataataacaaaaagaagttaaatgccacaaattttaatagtgagcttacttgaaggatttaagtaggtttaggaggtgaagaaggccgatggagaaatttacagattaattttggaagctctactctagctatcgaacaatcaaaggaatgcacctatcagctacaaagaacagctagacagctgttttttttcttttataaatgtttctgtgttgtgtcaaaatgatttctggtgatttaaactaacagataatcacagctgctgtctaaattcatagtgttgaaaattacaaaatgaaaaaaaaaaaaaaacacttcattacctgtgaagactgtgtctgtgtttttaactatttcttgtacaaatatatgaaaacttttatgaggagactggtgccaagtagctgaataatggggaaagggatattctgttcgtaaaaatcttagcagtgttaccaactctacgatatatatataaaaaaataattaaaacgttacaaagcgacagctatggtacatttgttttgtgtgaagctaaccggacctaacttcctgagtgcctggcttattttgaaacattttttttcattgaccattgataatgctgcaaatcagaaatgtacatacttcatttacaacagggttctttttatacttttgtagattctcatacatgtcacatacatggttgtctttatgtaacttaattttttcatccgcaggtgccattttcataataaacttctcttggatttgttaaaaaaaaaaaaaaaaaa

SEQ ID NO: 7799 - DNA, 1692 bp, Homo sapiens
aaaagcagaaagagattaccagccacagacgggtcatgagcccggtattactgctggccctcctggggttcatcctcccactgccaggagtgcaggcgctgctctgccagtttgggacagttcagcatgtgtggaaggtgtccgacctgccccggcaatggacccctaagaacaccagctgcgacagcggcttggggtgccaggacacgttgatgctcattgagagcggaccccaagtgagcctggtgctctccaagggctgcacggaggccaaggaccaggagccccgcgtcactgagcaccggatgggccccggcctctccctgatctcctacaccttcgtgtgccgccaggaggacttctgcaacaacctcgttaactccctcccgctttgggccccacagcccccagcagacccaggatccttgaggtgcccagtctgcttgtctatggaaggctgtctggaggggacaacagaagagatctgccccaaggggaccacacactgttatgatggcctcctcaggctcaggggaggaggcatcttctccaatctgagagtccagggatgcatgccccagccaggttgcaacctgctcaatgggacacaggaaattgggcccgtgggtatgactgagaactgcaataggaaagattttctgacctgtcatcgggggaccaccattatgacacacggaaacttggctcaagaacccactgattggaccacatcgaataccgagatgtgcgaggtggggcaggtgtgtcaggagacgctgctgctcatagatgtaggactcacatcaaccctggtggggacaaaaggctgcagcactgttggggctcaaaattcccagaagaccaccatccactcagcccctcctggggtgcttgtggcctcctatacccacttctgctcctcggacctgtgcaatagtgccagcagcagcagcgttctgctgaactccctccctcctcaagctgcccctgtcccaggagaccggcagtgtcctacctgtgtgcagccccttggaacctgttcaagtggctccccccgaatgacctgccccaggggcgccactcattgttatgatgggtacattcatctctcaggaggtgggctgtccaccaaaatgagcattcagggctgcgtggcccaaccttccagcttcttgttgaaccacaccagacaaatcgggatcttctctgcgcgtgagaagcgtgatgtgcagcctcctgcctctcagcatgagggaggtggggctgagggcctggagtctctcacttggggggtggggctggcactggccccagcgctgtggtggggagtggtttgcccttcctgctaactctattacccccacgattcttcaccgctgctgaccacccacactcaacctccctctgacctcataacctaatggccttggacaccagattctttcccattctgtccatgaatcatcttccccacacacaatcattcatatctactcacctaacagcaacactggggagagcctggagcatccggacttgccctatgggagaggggacgctggaggagtggctgcatgtatctgataatacagaccctgtcctttcaaaaaaaaaaaaaaaaaaaaaaaaaaaaaaaaaaaaaaaaaaaaaaaaaaaaaaaaaaaaaaaaaaaaaaaaaaaaaaaaaaaaaaa

SEQ ID NO: 7800 - DNA, 1044 bp, Homo sapiens
ctcgaggggccacccgggggttaaaggggcaattcccccgggggaaacggccggcggtgcgacacctttcccgcaaccggccttccggtggacagttggaacggaggccgctgaaatcggcaatcgctgcgggaaggttttccttgatggctctgctaattagacgaggaagacctccccaagaccaggaaacgcttccatcggagtactttgaagaagccatgaactacgttgcatcagtcatccgcgaggtaaaaggttccaggagttgggctgcttggaatttccaaaggggggtgagctctgcttttccatggcctctttcctgaaggggcatcacggctgctgtcgtcatcaccggctctgtggccaattgttgggggaaccttacgctacaagggcgagaccctgccccctgtgggcgtcaacagaaatcgcatcaaggtgaccaaagatggctatgcagacattgtggatgtcctgaacagccctttggaaggacctgaccagaagagcttcattcctgtggaaagggcagagagcaccttcctgttcctggtaggtcaggatgaccacaactggaagagtgagttctatgctaatgaggcctgtaaacgcttgcaggcccatgggaggagaaagccccagatcatctgttacccagagacagggcactatattgagcctccttacttccccctgtgtcgggcttccctgcatgccttggtgggcagtcctattatctggggaggggagcccagggctcatgccatggctcaggtggatgcttggaaacaactccagactttcttccacaaacacttgggtggccacgaggggacaatcccatcaaaagtgtaaattttatttgatcatgtggcctctctgttgctaatctctcctggaaacatctgccacatttagtgtgtgtatgtgtattcattcttttgtttttaataactaaagttttttcccctcattattaaaatgaatttaccagtaaaaaaaaaaaaaaaaaaataagaaggccgagaatataatagt

SEQ ID NO: 7801 - DNA, 2700 bp, Homo sapiens
tttgaaactggaataagtgtttattttctattaataaaaatgaattgtgacaaaagtggactctggcttcccctcccccctacccctctgggataaaaattttccagcattgccaggagctttcaggtacacattaaaaaaaaaaaaaaaagttaagcagctggagtataggatagtatttgattttcaagatcacccaaagctgcactatcgtcccaaagctgaccaagtggaataaaaaaaaaaaaaaaaaaaagcaccccatgcgcaaagatagacatttgcttgatctgctggctcagggccaaatgtttaatttgcttctccaaagtcattcatcttcaaaagtctgattctgggaaactgatgccactagcctaaaagcccactgaccatgtagtgtgcatcagtttcctcttgtccagtaagcatttatccaacagaagctaagataacatctacaggtgttctctctttacttctgacagtcacctgcatggtcactccatcggctaaggccagcctggacctcaccaataaatcatagccacctctgaatatacctgccagatagagcgaatgggaaatcctggttctcaggtactttatcggacctctcacatggctgcatgcccagaaatgtgatgatattgttgacagcctcttcaagggttttggtagaactgagggcaaaggtttcctctttctcaaaggtatctcccacctcttcccaagcagcagcaaagttaggctgacctcgtctgttatgtaaaggatgcgtagggatgggagggcgatgaggactaggatgatggcgggcaggatagttcagacggtttccatttcctgagcgtctgagatgttagtattagttagttttgttgtgagtgttagaattcgggcaccaggagaaggaagccaacaggatccgacccggtgttttgtgacaaaggcaagacccccaggtctacttagagcaaagttagtagaggaggcagctaggcgtggctctcattccttcccacagaatggattataagtcgagcctgatccaggatgggaatcccatggagaacttggagaagcagctgatctgccctatctgcctggagatgtttaccaagccagtggtcatcttgccgtgccagcacaacctgtgccggaagtgtgccaatgacatcttccaggctgcaaatccctactggaccagccggggcagctcagtgtccatgtctggaggccgtttccgctgccccacctgccgccacgaggtgatcatggatcgtcacggagtgtacggcctgcagaggaacctgctggtggagaacatcatcgacatctacaaacaggagtgctccagtcggccgctgcagaagggcagtcaccccatgtgcaaggagcacgaagatgagaaaatcaacatctactgtctcacgtgtgaggtgcccacctgctccatgtgcaaggtgtttgggatccacaaggcctgcgaggtggccccattgcagagtgtcttccagggacaaaagactgaactgaataactgtatctccatgctggtggcggggaatgaccgtgtgcagaccatcatcactcagctggaggattcccgtcgagtgaccaaggagaacagtcaccaggtaaaggaagagctgagccagaagtttgacacgttgtatgccatcctggatgagaagaaaagtgagttgctgcagcggatcacgcaggagcaggagaaaaagcttagcttcatcgaggccctcatccagcagtaccaggagcagctggacaagtccacaaagctggtggaaactgccatccagtccctggacgagcctgggggagccaccttcctcttgactgccaagcaactcatcaaaagcattgtggaagcttccaagggctgccagctggggaagacagagcagggctttgagaacatggacttctttactttggatttagagcacatagcagacgccctgagagccattgactttgggacagatgaggaagaggaagaattcattgaagaagaagatcaggaagaggaagagtccacagaagggaaggaagaaggacaccagtaaggagctggatgaatgagaggcccccagatgcagagagactggagagggtggggaggggcccagcggccttggtgacaggcccagggtgggaggggtcggggcccctggaggggcaatggggaggtgatgtcttctctctgctcagagagcagggactagggtaggaccctcaccgctgcgtccagcagacactgaaccagaattggaaacgtgcttgaaacaatcacacaggacacttttctacattggtgcaaaatggaatattttgtacatttttaaaatgtgatttttgtatatacttgtatatgtatgccaatttggtgctttttgtaaaggaacttttgtataataatgcctggtcattgggtgacctgcgattgtcagaaagaggggaaggaagccaggttgatacagctgcccacttcctttcctgagcaggaggatggggtagcactcacagggacgatgtgctgtatttcagtgtctatcccagacatacggggtggtaactgagtttgtgttatatgttgttttaataaatgcacaatgctctcttcctgttcttcaaaaaaaaaaaaaaaaaaaaaaaaaaaaaaaaaaaaaaaaaaaa

SEQ ID NO: 7802 - DNA, 556 bp, Homo sapiens
tttttttttttttttttttttttttatagcataaatgtgtttattttaaaaatgacaaaatcaaaatcgggttcattaaagagacaaatagacaacctaaggcaatatgaaatagcagaactgaaatggaggccttaatacagatactgacaagatttttcaaattataaaaaaatactatgaatatatcagtgtaaaagtttgagaaatatgtattttccattataaggttagtatagctctgataccaaaaattcaaaacaaattgcaaaagaaaacaaatctcattgttggacacagattaaaagaatctgaaataagatgttggcaaatgaaaaattcagcagggtttatagaatgatgcataatgaccaaatagagtttatccaaaaaaatcaagggttgttcaatgattgaaaatacacaaatggttaccctatcacattaacagataatacaaaaaatgcattatcttgaggaagaaaaagcataccataaatctcaacatgtaataaacactcttagttcatctaggaattaagcattcttaaactga

SEQ ID NO: 7803 - DNA, 369 bp, Homo sapiens
tttttcatcaaggaccacacaagctttaatacaaagattgcacaatgagcgcggggcgcggcacacaataagaagctctggaaacgcacactctctgacacctcaaagttttagggacttggatggctgcagaaaaatattggcaaagggattttctggggaggcaggaagaaaacggccgccctgcgaggcgacgaaccaggcgcgggggacgaagggaccgctggacccacgcccaggccgggtcggcggggtcggcaatcctcaagggggaaatggggtccgaggcacgccccaggcagcgggccccgctcttcggcagctccactcaccaggaactggagcatgatgtcggtggggagggcgagg

SEQ ID NO: 7804 - DNA, 2038 bp, Homo sapiens
gactagttctagatcgcgatctagaactagccgcgggagacgctgctgaggcggcttcggttgcgggtcggaacggcgctgctctgcggggccggtccaggctggcagctgccggcgcttggcggtgagggcgggctcccgagtggccccccaccgaaggcggtgggaccagcggctgaggccaggatgccgtccaggcggcgcggcggctcctcactcatcccagatgttggttatctttctgaagtagactgtccatggcctgaacattttccgaaaatcattttgagcaaaatatctgtttaataacaagataaccacatcaagatggttggaaagctgaagcagaacttactattggcatgtctggtgattagttctgtgactgtgttttacctgggccagcatgccatggaatgccatcaccggatagaggaacgtagccagccagtcaaattggagagcacaaggaccactgtgagaactggcctggacctcaaagccaacaaaacctttgcctatcacaaagatatgcctttaatatttattggaggtgtgcctcggagtggaaccacactcatgagggccatgctggacgcacatcctgacattcgctgtggagaggaaaccagggtcattccccgaatcctggccctgaagcagatgtggtcacggtcaagtaaagagaagatccgcctggatgaggctggtgttactgatgaagtgctggattctgccatgcaagccttcttactagaaattatcgttaagcatggggagccagccccttatttatgtaataaagatccttttgccctgaaatctttaacttacctttctaggttattccccaatgccaaatttctcctgatggtcccgagaatggccgggctatcagtacattcaatgatttctcgaaaagttactatagctggatttgatctgaacagctatagggactgtttgacaaagtggaatcgtgctatagagaccatgtataaccagtgtatggaggttggttataaaaagtgcatgttggttcactatgaacaacttgtcttacatcctgaacggtggatgagaacactcttaaagttcctccagattccatggaaccactcagtattgcaccatgaagagatgattgggaaagctgggggagtgtctctgtcaaaagtggagagatctacagaccaagtaatcaagccagtcaatgtaggagctctatcaaaatgggttgggaagataccgccagatgttttacaagacatggcagtgattgctcctatgcttgccaagcttggatatgacccatatgccaacccacctaactacggaaaacctgatcccaaaattattgaaaacactcgaagggtctataagggagaattccaactacctgactttcttaaagaaaaaccacagactgagcaagtggagtagcagaaccaggagcctcttccatacatgaggaaagattgctgccttttcagcagaagggaaattcctaggattggctgtcccctgccaagcttggtggagcgtctgcaccttggctgcgccgcctgtgcatttgccagtttcctcccactgagaggatggaggtgtccgcacagctttgggcctcgtgagggatctgcctcctgagcaaagagctcttgatcccgatttcatgcacagccctgcagtaaggagcccagaaggaacatgtgtttcctgttaaaactcctcttgttctcttttcttacattatgacgtttgttttcaaggagagggtttaaaaatgggatcctgtaagcagacttgggcagtctccttttgaaataggttgtctgtacatgttctaatgttttgtagaacacgtgtgcctgtttaagtgtattgatgtgaataatattaaatatcctaattatttaattcattgtattgtttctgagaagttgggaaattaccattatacatttacaacctaatgacttttgtattttatttttcaaaataaaagctttcaatgtgaagcaaaaaaaaaaaaaaaata

SEQ ID NO: 7805 - DNA, 1193 bp, Homo sapiens
gggtttttttttttttttttttttttttttttttttttttttggctttttaaaatttttttattttttcactcatcatttatttacaaatacacattataacttttatatacattgcacatttacatggtagaaaagtacaaaactatatatttaaatgaatttatattttaacttgccatgtttgaaaatataaaattgcatcagaaaaaagtattatgaaaagcaagaaacttgaactgataaagctttgatataacttttagtgatatactggttgaaaaagaactaatttaaaaggtacagctgagtagcttaaaggaaacacctaacaaaaggttgaatgtgtagccttcaacatcctttagtctcctgacacccacatcatttctttgtatctgtaacatcttaaaagtacattactagaattctaatcatctcctctctcacaaatgtcttcatcataacaaaagaactgaagtaggagtttcctcaaagatgcttatcttctgtaccttgtatttgagtcagagttataatgccttttggtcagtcaaggttccttgtaaacaaaacccgagggatcatgtatgtacagatcaggcagcagagaatccaataaataaacatgacagaaactgacatgcaagtttgttgaaagtggaaaagagtctaacagtgaaatgaagggagacagatgagtgagtgaatagtaaggaatggacttaaatggtttacaaggaaaaaaagcttttactttacaagcaagagacctcacaataaataacaactgctcttcctttcacgaataaatttcttcaaaaacaaggtatacagtcaaccagacattttatgtataaattataaaacatgacacagtataaataaatgtctacaagtctcaactatgggcctcatccagtagacctcacaatgaatgcctctccgtgtccaatgagtaacaaggtggcctgggagagagctttaggacaaaggtcctttaatgtatagttttccccccaaataaataagcatacacttatttacagtatggacaatatatttttctttttttctttttcttttttttttttttttttgttgcacaagggctatgttcaacactgaaccacttatagagagttaacccactctaaaaattaagaaaatatcggaaagctgtagtcctggtct

SEQ ID NO: 7806 - DNA, 1306 bp, Homo sapiens
  misc_feature (38)..(38): n is a, c, g, or t
  misc_feature (75)..(75): n is a, c, g, or t
agaatttaaataccgacctcacctatagggaaattttnggcccctcgaggcccaagaattaaattaaaccccccngaggcagagggttggccagtgaggcccgagatccacaccccactgtacctcccagccccgggtgaccagagcgagactgtcccaaaaaaaaaattgataattaaatgttaaaagtcagcgactccagtaatacgtggtgggctgagtattagactactggcttacatcctctgatgtcattactttcttgttcgtttgtgacttgaggttggattttaagcaaatgtatttgtggctttttaccaaggtcatatggccagataacttttcaaaagcattagttaaagaattctgattagtttgaattagaaacaaaactcaaagaacatgacctaatttaacaggttaatttgaagtgcatctgccaagtagaagaccagcaagaaaaaaaaaatgggttcctaggaagaggtagtaggttgcatagttttagggcagggattttgcccacaaggaggtaactatacgacctgctgcctttcttagggccttattattcaccgataacctgtttccttgctactttgctttggtgtaagcagagttctttctgtaggttttttcaaatgaaaacattgcaagaatatcaaagagagcagtgtttgcgttagtgattataaactgcagcatggtgctgacattgataactgaaagtcaactaatgagaatttgagacttctgaagtacacttagttgctagtgtctcccttttggtgtcactggaaagtttagaaagcatggttttgtttttgctcaggtttctctttctgtgatgcagagactctcagctgttcctcctctatgtctacattatgtctgaaggaaagaatttaacaaaacttgaaatactgctgtttttctacaatgtttgtaaatatttatcttgctgcttttctaggtttgtcttctggatttaaaatttggggcggctggggtggaattgcatggtttgggaatgggtaattgagctgctgctcattatggtatgtaacagtgatttgtctgtttaatatgtacaagaactggaaggtcaataaaatgaaagtggttgtcttgactgggtaatagtgttacatattttgttaaaagttatacatcttttcaataaaaacactgcatacttcaaaactaaaaaaaattaagtcatccttaacccttatccccatccttgcagtagtagatgcatttttcatttgtaattattatgatttgttcttagtttcatttttca

SEQ ID NO: 7807 - DNA, 450 bp, Homo sapiens
taagggtttggcttctgaaaggtattccaagtacaccggcaaaatatctactttctctatgagtttataaattgaagtggttcttcaggacaaacaaaaacccttttcatctaaaattttaattgagaccaatttcagtgccctgggaattagttccaaagtttggctcaagttttctggcactgagcacagggctctggcctcaggactgcactgggtcaccttacagctgcacctcagggctacttgccaagaagctggtctcatggcaacacttccctatggcttaacaccagaacattgagcttggatacccaacctggctgaaagcaattcacatgaactgcaactctatctagcaagcaacttgcaggagtcatctccgtgtagcacttgtaacaccctctggacatttctgggagaaaaataagacttaatggttcattgggt

SEQ ID NO: 7808 - DNA, 1023 bp, Homo sapiens
  misc_feature (833)..(1020): n is a, c, g, or t
gccttcagcataaaagctgatccacaaacaagaggagcaccagacctcctcttggcttcgagatggcttcgccacaccaagagcccaaacctggagacctgattgagattttccgccttggctatgagcactgggccctgtatataggagatggctacgtgatccatctggctcctccaagtgagtaccccggggctggctcctccagtgtcttctcagtcctgagcaacagtgcagaggtgaaacgggagcgcctggaagatgtggtgggaggctgttgctatcgggtcaacaacagcttggaccatgagtaccaaccacggcccgtggaggtgatcatcagttctgcgaaggagatggttggtcagaagatgaagtacagtattgtgagcaggaactgtgagcactttgtcacccagctgagatatggcaagtcccgctgtaaacaggtggaaaaggccaaggttgaagtcggtgtggccacggcgcttggaatcctggttgttgctggatgctcttttgcgattaggagataccaaaaaaaagcgacagcctgaagcagccacaaaatcctgtgttagaagcagctgtgggggtcccagtggagatgagcctcccccatgcctccagcagcctgaccctcgtgccctgtctcaggcgttctctagatcctttcctctgtttccctctctcgctggcaaaagtatgatctaattgaaacaagactgaaggatcaataaacagccatctgccccttcaaaaaaaaaaaaaaaaaaaaaaaaaaatactcaaaaactatgggcagagttggattgtatataggtctttatttnnnnnnnnnnnnnnnnnnnnnnnnnnnnnnnnnnnnnnnnnnnnnnnnnnnnnnnnnnnnnnnnnnnnnnnnnnnnnnnnnnnnnnnnnnnnnnnnnnnnnnnnnnnnnnnnnnnnnnnnnnnnnnnnnnnnnnnnnnnnnnnnnnnnnnnnnnnnnnnnnnnnnnnnnnnnnnnnnnnnnnnnnnnntat

SEQ ID NO: 7809 - DNA, 1965 bp, Homo sapiens
ggcacgagggcctctccagctgcgacacagatggcgcgcgggctcttgggttctgtagttttctcgcgatccaaaaggctccgtgcccaagtgagtccttaccgcctccctacccagcggcttcccctccgctagtacgcatgtccacagcttcacggaccgggagagagggggcgcggaaggaaggaggcgggacggtattacaaacaaaaaaatacggccttctcgagaagcgacggcggagggcccgctcctcccagaaggcggtgcagcctgcccgggcgagccacgcacgcagagggttgtggggcggatagctcccctccagatggaggctcacgaagtagggtgggcgggggactccatatcccagcgtgccccgcggcgggccctaccggccgcgactccgggcttggccccggccctagctcgtcggctgtgtattggggcgcgtggaggctgcagtcacggtggcgcccgcggggacggaggagggaatgagtgaagaggagcaaggctccggcactaccacgggctgcgggctgcctagtatagagcaaatgctggccgccaacccaggcaagaccccgatcagccttctgcaggagtatgggaccagaatagggaagacgcctgtgtacgaccttctcaaagccgagggccaagcccaccagcctaatttcaccttccgggtcaccgttggcgacaccagctgcactggtcagggccccagcaagaaggcagccaagcacaaggcagctgaggtggccctcaaacacctcaaaggggggagcatgctggagccggccctggaggacagcagttctttttctcccctagactcttcactgcctgaggacattccggtttttactgctgcagcagctgctaccccagttccatctgtagtcctaaccaggagcccccccatggaactgcagccccctgtctcccctcagcagtctgagtgcaaccccgttggtgctctgcaggagctggtggtgcagaaaggctggcggttgccggagtacacagtgacccaggagtctgggccagcccaccgcaaagaattcaccatgacctgtcgagtggagcgtttcattgagattgggagtggcacttccaaaaaattggcaaagcggaatgcggcggccaaaatgctgcttcgagtgcacacggtgcctctggatgcccgggatggcaatgaggtggagcctgatgatgaccacttctccattggtgtgggctcccgcctggatggtcttcgaaaccggggcccaggttgcacctgggattctctacgaaattcagtaggagagaagatcctgtccctccgcagttgctccctgggctccctgggtgccctgggccctgcctgctgccgtgtcctcagtgagctctctgaggagcaggcctttcacgtcagctacctggatattgaggagctgagcctgagtggactctgccagtgcctggtggaactgtccacccagccggccactgtgtgtcatggctctgcaaccaccagggaggcagcccgtggtgaggctgcccgccgtgccctgcagtacctcaagatcatggcaggcagcaagtgaagccccagctggactcatggatgtgcaccctttgctccctgctctttctgcctctgggctcatgtatctgcgcagctctggtaccctctgtgggtgccatctctacctctgacacagactgcctgccttgaagctgagaaggcacagggcaaggagccaaggaccacagagcctcagccagcccaggatccgtcctcattttattggtgatgatgaatgggaatgaaatcagggggctgtctactagagcctggaataaatatgctgctttgtggatttttaaaaaaaaaaaaaaaaaaaaaaaaaaaaaaaaaaaaaaaaaaaacgcagcacaaacaacaaacacaagaagggcgggggcgccgcc

SEQ ID NO: 7810 - DNA, 3530 bp, Homo sapiens
  misc_feature (186)..(233): n is a, c, g, or t
  misc_feature (1619)..(1633): n is a, c, g, or t
  misc_feature (1709)..(1774): n is a, c, g, or t
  misc_feature (1865)..(1923): n is a, c, g, or t
  misc_feature (2032)..(2036): n is a, c, g, or t
  misc_feature (2039)..(2054): n is a, c, g, or t
  misc_feature (2393)..(2429): n is a, c, g, or t
  misc_feature (2514)..(2537): n is a, c, g, or t
caggaagggccatgaagattaataaagatttggactcagggcaaatatttacttagtagcaataactcaaagaattactgttgaataaataagccaattaagcagccaatcacgtactatgcggatgcacacaaatgaaaccctcacttcaacctgaagacattcgcacatgagttacgtagaggnnnnnnnnnnnnnnnnnnnnnnnnnnnnnnnnnnnnnnnnnnnnnnnnccacaccaatttcaggatctttgtcactgacagcagcactaagacttgttaactttatatagttaagaagaacaaggctgagcgcgatgactcacgcctgtaagcctagaactttgggaggccaaagcaggcagactgcttgagcccaggagttccagaccagcctgggcaacatggcaacaccccatctctacaaaaaaatacaagaatcagctgggcgtggtgatgtgttcctgtaatctcagctactcgggaggcagaggcaggaggattgcttgaacccgggaggcagaggttgtagttagccgagatctcgccactgcactccagtctggacgacagagtgagactcagtctcaaataaataaataaatacataaatataaggaaaaaaataaagctgctttctcctcttcctcctctttggtctcatctggctctgctccaggcatctgccacaatgtgggtgcttacacctgctgcttttgctgggaagctcttgagtgtgttcaggcaacctctgagctctctgtggaggagcctggtcccgctgttctgctggctgagggcaaccttctggctgctagctaccaagaggagaaagcagcagctggtcctgagagggccagatgagaccaaagaggaggaagaggaccctcctctgcccaccaccccaaccagcgtcaactatcacttcactcgccagtgcaactacaaatgcggcttctgtttccacacagccaaaacatcctttgtgctgccccttgaggaagcaaagagaggattgcttttgcttaaggaagctggtatggagaagatcaacttttcaggtggagagccatttcttcaagaccggggagaatacctgggcaagttggtgaggttctgcaaagtagagttgcggctgcccagcgtgagcatcgtgagcaatggaagcctgatccgggagaggtggttccagaattatggtgagtatttggacattctcgctatctcctgtgacagctttgacgaggaagtcaatgtccttattggccgtggccaaggaaagaagaaccatgtggaaaaccttcaaaagctgaggaggtgggtgaagggattatagagtcgctttcaagataaattctgtcattaatcgtttcaacgtggaagaggacatgacggaacagatcaaagcactaaaccctgtccgctggaaagtgttccagtgcctcttaattgagggtgagaattgtggagaagatgctctaagagaagcagaaagatttgttattggtgatgaagaatttgaaagattcttggagcgccacaaagaagtgtcctgcttggtgcctgaatctaaccagaagatgaaagactcctaccttattctggatgaatatatgnnnnnnnnnnnnnnnagaaagggacggaaggacccttccaagtccatcctggatgttggtgtagaagaagctataaaattcagtggatttnnnnnnnnnnnnnnnnnnnnnnnnnnnnnnnnnnnnnnnnnnnnnnnnnnnnnnnnnnnnnnnnnntggtagagcggaaagtggaacgagacttcaacacaccagtgggaaaactcctagagtaactgccattgtctgcaatactatcccgttggtnnnnnnnnnnnnnnnnnnnnnnnnnnnnnnnnnnnnnnnnnnnnnnnnnnnnnnnnnnncactgaacacacgaataacttggatagcaaatcctgagacaatggaaaaccattaactttacttcattggcttataaccttgttgttattgaaacagcacttctgtttnnnnnttnnnnnnnnnnnnnnnnaaggaatacacacaggaataatgaccccaaaaatgcttagataaggcccctatacacaggacctgacatttagctcaatgatgcgtttgtaagaaataagctctagtgatatctgtgggggcaaaatttaatttggatttgattttttaaaacaatgtttactgcgatttctatatttccattttgaaactatttcttgttccaggtttgttcatttgacagagtcagtattttttgccaaatatccagataaccagttttcacatctgagacattacaaagtatctgcctcaattatttctgctggttataatgcttttttttttttttgcttttatnnnnnnnnnnnnnnnnnnnnnnnnnnnnnnnnnnnnnaaatagtcaacagatgtttccaagaacatatgatatgataatcctaccaattttcaagaagtctctagaaagagataacacatgnnnnnnnnnnnnnnnnnnnnnnnncccagcccacggtgcctgttccatgaatgctggctacctatgtgtgtggtacctgttgtgtccctttctcttcaaagatccctgagcaaaacaaagatacgctttccatttgatgatggagttgacatggaggcagtgcttgcattgctttgttcgcctatcatctggccacatgaggctgtcaagcaaaagaataggagtgtagttgagtagctggttggccctacatttctgagaagtgacgttacactgggttggcataagatatcctaaaatcacgctggaaccttgggcaaggaagaatgtgagcaagagtagagagagtgcctggatttcatgtcagtgaagccatgtcaccatatcatatttttgaatgaactctgagtcagttgaaatagggtaccatctaggtcagtttaagaagagtcagctcagagaaagcaagcataagggaaaatgtcacgtaaactagatcagggaacaaaatcctctccttgtggaaatatcccatgcagtttgttgatacaacttagtatcttattgcctaaaaaaaaatttcttatcattgtttcaaaaaagcaaaatcatggaaaatttttgttgtccaggcaaataaaaggtcattttaatttaaaaaaaaaaaaaaaaaaaaaaaaaaaaaaaaggccaaggaaaaaaaatattcctacttaaattttaagtctataattcaatttaaatatgtgtgtgtctcatccaggataggataggttgtcttctattttccattttacctatttactttttttgtaagaaaagagaagaatgaattctaaagatgttccccatgggttttgattgtgtctaagctatgatgaccttcatataatcagcataaacataaaacaaattttttacttaacatgagtgcactttactaatcctcatggcacagtggctcacgcctgtaatcccagcacttggggaggacaatgtggggtggatcacgaggtc

SEQ ID NO: 7811 - DNA, 2231 bp, Homo sapiens
  misc_feature (666)..(673): n is a, c, g, or t
gtgcagcagagtgcgttcctcgtctgccagccggcttggctagcgcgcggcggccgtggctaaggctgctacgaagcgagcttgggaggagcagcggcctgcggggcagaggagcatcccgtctaccaggtcccaagcggcgtggcccgcgggtcatggccaaaggagaaggcgccgagagcggctccgcggcggggctgctacccaccagcatcctccaaagcactgaacgcccggcccaggtgaagaaagaaccgaaaaagaagaaacaacagttgtctgtttgcaacaagctttgctatgcacttgggggagccccctaccaggtgacgggctgtgccctgggtttcttccttcagttgtcttttgcttctcctcattccaggtgggccctttctctgcctccatcatcctgtttgtgggccgagcctgggatgccatcacagaccccctggtgggcctctgcatcagcaaatccccctggacctgcctgggtcgccttatgccctggatcatcttctccacgcccctggccgtcattgcctacttcctcatctggttcgtgcccgacttcccacacggccagacctattggtacctgcttttctattgcctctttgaaacaatggtcacgtgtttccatgttccctactcggctctcaccannnnnnnncagcaccgagcagactgagcgggattctgccaccgcctatcggatgactgtggaagtgctgggcacagtgctgggcacggcgatccagggacaaatcgtgggccaagcagacacgccttgtttccaggacctcaatagctctacagtagcttcacaaagtgccaaccatacacatggcaccacctcacacagggaaacgcaaaaggcatacctgctggcagcgggggtcattgtctgtatctatataatctgtgctgtcatcctgatcctgggcgtgcgggagcagagagaaccctatgaagcccagcagtctgagccaatcgcctacttccggggcctacggctggtcatgagccacggcccatacatcaaacttattactggcttcctcttcacctccttggctttcatgctggtggaggggaactttgtcttgttttgcacctacaccttgggcttccgcaatgaattccagaatctactcctggccatcatgctctcggccactttaaccattcccatctggcagtggttcttgacccggtttggcaagaagacagctgtatatgttgggatctcatcagcagtgccatttctcatcttggtggccctcatggagagtaacctcatcattacatatgcggtagctgtggcagctggcatcagtgtggcagctgccttcttactaccctggtccatgctgcctgatgtcattgacgacttccatctgaagcagccccacttccatggaaccgagcccatcttcttctccttctatgtcttcttcaccaagtttgcctctggagtgtcactgggcatttctaccctcagtctggactttgcagggtaccagacccgtggctgctcgcagccggaacgtgtcaagtttacactgaacatgctcgtgaccatggctcccatagttctcatcctgctgggcctgctgctcttcaaaatgtaccccattgatgaggagaggcggcggcagaataagaaggccctgcaggcactgagggacgaggccagcagctctggctgctcagaaacagactccacagagctggctagcatcctctagggcccgccacgttgcccgaagccaccatgcagaaggccacagaagggatcaggacctgtctgccggcttgctgagcagctggactgcaggtgctaggaagggaactgaagactcaaggaggtggcccaggacacttgctgtgctcactgtggggccggctgctctgtggcctcctgcctcccctctgcctgcctgtggggccaagccctggggctgccactgtgaatatgccaaggactgatcgggcctagcccggaacactaatgtagaaaccttttttttacagagcctaattaataacttaatgactgtgtacatagcaatgtgtgtgtatgtatatgtctgtgagctattaatgttattaattttcataaaagctggaaagcaaaaaaaaaaaaaaaaaaaaaaaaaaaaaaaaaaaaaaaaaaaatctgtggccttctgcatggtggcttcgggcaacgtggcgggccctagagg

SEQ ID NO: 7812 - DNA, 456 bp, Homo sapiens
tttttttttttaatgttaatattttatttcacccaatacatccaaaatattatcatttttgacacacaatataccaaaactactgaaatagtattcttattattcatattaaatctccagaatctagtgtgattttatgcttataccaattataacagcacatcttgatttaaactaaccccatcttaagtggttgatggccacatgtggaaagtggctacgtggtggatagcgcatgtctccaggaatccaactatgaaatggtcttctctggttctcagaggagaatctagttcagtgagttctatttaaaaaaatttttttcaaattgaatcccatttcagtaacctgacccatttctaacatctataggcccttttgtattttatcaccatcccaatagtgtttataaatgtttcccaattaccataattatgttaaataacacccaactct

SEQ ID NO: 7813 - DNA, 796 bp, Homo sapiens
  misc_feature (517)..(778): n is a, c, g, or t
ttttttttttttttttttcaatacaacgtacgggtaggtgttgaggggggcaggtggtgaaatctacagctccttttcttgtccataaatgctcagagtattcaaacaggcctcagacatacaccagagccatggcaatgcatagtttaagatattaaatttctcttaagtgatttcgactcattttgcaagcccttgacaaacccttcagatgcgaagatttaaagaattgtctagcccttttgtgttacacgaaatgacaaaactttagttcactcttactgtaactgtcatctctctgaaggccaaaggaccgtactttgaggtacaacatttattatttttaattaagaaagccctttgctggtgattctagctcactgccttcaacagtcattgagtcccacatttgactgaagttgttggtctatagatttgaaaagaagctgcccaaataatatgtgacacatcatagagcttgtcacatggagaggagaggaccagccgcgaccacgcnnnnnnnnnnnnnnnnnnnnnnnnnnnnnnnnnnnnnnnnnnnnnnnnnnnnnnnnnnnnnnnnnnnnnnnnnnnnnnnnnnnnnnnnnnnnnnnnnnnnnnnnnnnnnnnnnnnnnnnnnnnnnnnnnnnnnnnnnnnnnnnnnnnnnnnnnnnnnnnnnnnnnnnnnnnnnnnnnnnnnnnnnnnnnnnnnnnnnnnnnnnnnnnnnnnnnnnnnnnnnnnnnnnnnnnnnnnnnnnnnnnnnnnnnnnnnnnnnnnnnncccgtcatgatcctggcc

SEQ ID NO: 7814 - DNA, 2442 bp, Homo sapiens; identical to SEQ ID NO: 6129

SEQ ID NO: 7815 - DNA, 3070 bp, Homo sapiens
  misc_feature (20)..(50): n is a, c, g, or t
  misc_feature (2828)..(2839): n is a, c, g, or t
  misc_feature (2841)..(2863): n is a, c, g, or t
  misc_feature (2882)..(2886): n is a, c, g, or t
  misc_feature (2888)..(2890): n is a, c, g, or t
  misc_feature (2892)..(2901): n is a, c, g, or t
  misc_feature (2905)..(2906): n is a, c, g, or t
  misc_feature (2921)..(2923): n is a, c, g, or t
  misc_feature (2931)..(2932): n is a, c, g, or t
  misc_feature (2934)..(2934): n is a, c, g, or t
  misc_feature (2956)..(2957): n is a, c, g, or t
  misc_feature (2959)..(2959): n is a, c, g, or t
ggcacgagggcggtgcgtgnnnnnnnnnnnnnnnnnnnnnnnnnnnnnnncccagcaggccgagggaggaagtagcgtggagccggtgccgagccggggcgaagctggatcccctagatatactgtcttcaagctcactgatattttcctctgcttgatccattgtgctgttgagagcctctagtaaatttttcagactgacagaccaaggatgcagctgctactaccggaggtgtgtggcaccttacctcagcaaggccatgagaccgtgtggccatgatgtggccatgaggggcccacgcgtggctggaagacatggccactccagtcggtgttgagcacggcgagcagtctcaggcctttgctgatgatgattaaaggtggtggctgtggccttgaaaacagtcatgtgaaaactcatcaccttaaggtgttaagtgtaaggatcttcacgatgaaatttctgtaaatggtgcagtcagcctcagtttccaaagccggaaaaggatcctctagtagccacggtgtggcagctgctctgaaccaggacctggacccggacccaaagtgccatgtctttaatgttagctcccagcgatgccagatgggatcagcacagccctgcctctgctgctaattgttcctctaaagtaatcgccatgcgttctttgggcttcatctttaaaggaatgaagcaactgagattattctggaaaaccttttggcagttagtgaaattagagtacaactaagaacattttcagacctccactgtggatgacctgggtataatctcacaaatcgatgggactgcaaggattgtaaactgaaatgaacatgattatactctgttggaagagcctaagaggaaactgatgccatgagtttcagagagtaatgcttaaccccagttacacaggatgccgtcttgtgtttcctcttgtttagttacccactacagtgattttgtgatctgctaatgggttgccacccacaaccattgctttagcacttttacttcaaatcaatgaaggattgataaaagttctcctggtgtctccgcagagtgccttccaggaacagatctttgcatagaatatcagtggtttccttttttgtttcaaatagtggtcagaaaatacccagtgttgactcaccaaggcaatcagcttcctttttccctttttttgtttttttttaacattttatatttttgctttattttattttattttattttttgagacggagttccactctgtcgccaggctggagtgaagtggtacaatcttggctcactgcaacctccacctcccgggttcaagcaattctcctggctcagcctcctgagtgctgggactacaggcgcgtaccttctttagtagagactgggtttcaccatgttggccaggatggtctctatctcctgaccttgtgatctgcctgcctcagcttcccaaagtgctgagatgacaggtgtgagccatcagacccagcatttttttttttaatttaaatttaaatttttttcatttttttgagaggttttttttgttttgttttgttgttgttgttgttgttgttgttgttgtttttgagacagtcttggctctgtcacccaggctgggagtgcagtggcatgatctctgcaacctctacctcccaggttcaagcaattcttgtgcctcagcctcccaagtaactgggactacaggtgcacgctaccacacctggctgattttttttatgttttagtagagacagggtttcaaccatgttgcccaggttggtctcaaactcctgagctcaggcaatccacccgccttggcctcccaaagtgctaggattacaggtatgagccaccacacccagctattttttctttcgttttttaattttaaagttggggggggtctcaatttgttatcctggctgatctcgaactcccggacttaagcgatcctctggctccaagcccactaccagtctcaggtttctttactaaaagatcactacctttttttctcttatctgctgccatgtgagatgtggctttcaccttccgccatgattgtgaggccttcccagccacgtggaactgtaagtccaataaacctcttttgtaaattaaaaaaaaatcactatttaagatactaggatggattgtgactgttgaggagtacttacatatcctacatttgactacattatttccaaaccaagtattccatccaaaggaacatactgctataatagagaccaaggagggactgtttaaggttgccaaggtgaagcgagctgagaggctttgtcctcatgccagtaactctgaaatctctcttaattcctgctgtccaggcagcagaatgccatggtttccccaagtaggtagctgctttagcagttaaagcccaaatgtctgttctgttgatcagaggtctctgaatttctgaagtggtgtttcgtttctggtgactgagttaatcctttacaatccctcttgtaaagtgtgctaatagaaagaatccacctttcaaagctgcagaaccagaccgtgccctaaattgaccaacgtagctgatgtgcctcaggaagtctcttgccagctgtccctgtgaagaccccctcctcccccccagctgctgccttgcacactgaagcatctcagactgtgcaaagccgtgtagtcatcaagacagtaaatcccagggcttggttaagtgctgtgtgataacttgtttggatgagacttaacttaaaaccacttacaataaacttgggaaactaccgaaaaaaaaaaaaaaaaaaaaaaaaaggacaaaaaagcnnnnnnnnnnnncnnnnnnnnnnnnnnnnnnnnnnncgtacccagctttcttggnnnnncnnncnnnnnnnnnncccnnccccccccccccggnnncccccgcnncnccccccccccccgccccccgcnncncccacccgcggcccccccgggggggggcggcccttaaaagaaaccccccgggggggcccacattctttgcggcccaccttcttttgttaaaaagggggccccccaaagggg

SEQ ID NO: 7816 - DNA, 6356 bp, Homo sapiens
  misc_feature (556)..(582): n is a, c, g, or t
  misc_feature (1047)..(1078): n is a, c, g, or t
  misc_feature (2762)..(2824): n is a, c, g, or t
cggggccaaagacctggtgtgttccaagatgtccagggccaaggatgccgtgtcctccggggtggccagcgtggtggacgtggctaagggagtggtccagggaggcctggacaccactcggtctgcacttacgggcaccaaggaggcggtgtccagcggggtcacaggggccatggacatggctaagggggccgtccaagggggtctggacacctcgaaggctgtcctcaccggcaccaaggacacggtgtccactgggctcacgggggcagtgaatgtggccaaagggaccgtacaggccggtgtggacaccaccaagactgtgctgaccggcaccaaagacacagtgactactggggtcatgggggcagtgaacttggccaaagggactgtccagactggcgtggaaacctccaaggctgtgctgaccggcaccaaagatgctgtgtccactgggctcacaggggcagtgaatgtggccagaggaagcattcagaccggtgtggacaccagtaagactgtcctaacaggtaccaaggacaccgtctgtagtggnnnnnnnnnnnnnnnnnnnnnnnnnnnaggaaccatccagaccggcgtggacaccagtaagactgtcctaacaggtaccaaggacaccgtctgtagtggggtgactggtgccatgaatgtggccaaaggaaccatccagaccggcgtggacaccagtaagactgtcctaacaggtaccaaggacaccgtctgtagtggggtgactggtgccatgaatgtggccaaaggaaccatccagaccggcgtggacaccaccaagactgtcctaactggcaccaagaacactgtctgcagtggggtgaccggtgccgtgaacttggccaaagaggccatccaggggggcctggataccaccaagtctatggtcatgggtacgaaagacacgatgtccactgggctcacgggggcagcgaatgtggccaagggggccatgcaaactgggctgaacacaacccaaaatatcgcaacaggtacaaaggacaccgtctgcannnnnnnnnnnnnnnnnnnnnnnnnnnnnnnnggaaccatccagacaggcgtggacaccaccaagatcgttctaactggtaccaaggacactgtctgcagtggggtcaccggtgctgcgaatgtggccaaaggggccgtccaggggggcctggacactacaaagtctgtcctgactggcactaaagatgctgtgtccactgggctcacaggggctgtgaacgtggccaaagggaccgtccagaccggcgtagacaccaccaagactgtcctaaccggcaccaaggacaccgtctgcagtggggtgaccagtgctgtgaacgtggccaaaggggccgtccaggggggcctggacaccaccaagtctgtggtcataggtacaaaagacacgatgtccactgggctcacgggggcagcgaatgtggccaagggggctgtccagacaggtgtagacacagccaagaccgtgctgaccggcaccaaggacacagtgactactgggctcgtgggggcagtgaatgtcgccaaagggaccgtccagacaggcatggacaccaccaaaactgtcctaaccggtaccaaggacaccatctacagtggggtcaccagtgccgtgaacgtggccaagggggctgtgcaaactgggctgaaaacgacccaaaatatcgcgacaggtacaaagaacacctttggcagtggggtgaccggtgctgtgaatgtggccaaaggggccgtccagacaggtgtagacacagccaagaccgtgctgaccggcaccaaggacacagtcactactgggctcatgggggcagtgaatgtcgccaaagggactgtccagaccagtgtggacaccaccaagactgtcctaactggtaccaaggacaccgtctgcagtggggtgaccggtgctgcgaatgtggccaagggggccgtccagacgggtgtagacacggccaagaccgtgctgaccggtaccaaggacactgtctgcagtggggtcaccggtgctgtgaacgtggccaagggtgctgtgcaaactgggctgaaaacgacccaaaatatcgcaacaggtacaaagaacacccttggcagtggggtgaccggtgctgcgaatgtggccaaaggggccgtccaggggggcctggacactacaaagtctgtcctgactggcactaaagatgctgtgtccactgggctcacaggggctgtgaacttggccaaagggactgtccagaccggcatggacaccaccaagactgtgttaactggtaccaaggatgctgtgtgcagtggggtgaccggtgctgcgaatgtggccaagggggccgtccagacgggtgtagacacggccaagaccgtgctgaccggcaccaaggacacagtcactactgggctcatgggggcagtgaatgtcgccaaagggaccgtccagaccagtgtggacaccaccaagactgtcctaactggtaccaaggacaccgtctgcagtggggtgaccggtgctgcgaatgtggccaagggggccgtccaggggggcctggacactacaaagtctgtcctgactggcactaaagacaccgtatccactgggctcacaggggctgtgaacttggccaaagggactgtccagaccggcgtggacaccagcaagactgtcctgaccggtaccaaggacaccgtctgcagtggagtcactggtgccgtaaatgtggccaaannnnnnnnnnnnnnnnnnnnnnnnnnnnnnnnnnnnnnnnnnnnnnnnnnnnnnnnnnnnnnnactactggagtcacgggggcagtgaatgtggccaaaggaaccgtgcagaccggcgtggacgcctccaaggctgtgcttatgggtaccaaggacactgtcttcagtggggttaccggtgccatgagcatggccaaaggggccgtccaggggggcctggacaccaccaagacagtgctgaccggaaccaaagacgcagtgtccgctgggctcatggggtcagggaacgtggcgacaggggccacccacactggcctcagcaccttccagaactggttacctagtacccccgccacctcctggggtggactcaccagttccaggaccacagacaatggtggggagcagactgccctgagcccccaagaggccccgttctctggcatctccacgcccccggatgtgctcagtgtaggcccggagcctgcctgggaagccgcagccactaccaagggccttgcgactgacgtggcgacgttcacccaaggggccgccccaggcagggaggacacggggcttttgaccaccacacacggccccgaagaagccccacgcttggcaatgctgcagaatgagttggaggggctgggggacatcttccaccccatgaatgcggaggagcaagctcagctggctgcctcccagcccgggccaaaggtgctgtcggcggaacaggggagctacttcgttcgtttaggtgacctgggtcccagcttccgccagcgggcatttgaacacgcggtgagccacctgcagcacggccagttccaagccagggacactctggcccagctccaggactgcttcaggctgattgaaaaggcccagcaggctccagaagggcagccacgtctggaccagggctcaggtgccagtgcggaggacgctgctgtccaggaggagcgggatgccggggttctgtccagggtctgcggccttctccggcagctgcacacggcctacagtggcctggtctccagcctccagggcctgcccgccgagctccagcagccagtggggcgggcgcggcacagcctctgtgagctctatggcatcgtggcctcagctggctctgtagaggagctgcccgcagagcggctggtgcagagccgcgagggtgtgcaccaggcttggcaggggttagagcagctgctggagggcctacagcacaatcccccgctcagctggctggtagggcccttcgccttgcccgctggcgggcagtagctgtaggagcctgcaggcccggcgcggggtcgccctgctctgtccagggaggagctgcctcagaactttctccccgcccccaaacctggatcggttccctaaagccctagacctttggggctgcagctggctgagcgccgaggggctgcggaggcagtgaccttcttaactgagccaccccacgccctgctccgggcctgcctgcatctcccacctcctccccagcgctgcctgcccctctcggagcctggggtcactcagaccaccagccaagagccttcccttgaagtccccaagcaagcactgcaattaggaaagagaaaaagcagcgtgcccagcctggaagggcatctgtttgccccgctagcaacccttttatatctagcagggctcttccagtcctgcagcacgggcccccagctatcagcggtgcaggcagtgctgtggcatcccaggctccgggcagctccgttctcatgctgaaagtgggtctccggccttagcacacacaccttgagggtcttaagaaccacattccctcatagtagaaagtactagaaaaagcgacactgccatcatcatcccaaggcaggctgctactgcctttgctgacccccggggtggcctcacggtggggacaaagctgccaggagccacagcagccacagctggggctttgcaccagcctggcttgagactgagcagtttgcagggggtggggggtgcaaaaaacaagcaaacaggctgctgctgcctccagctgcccaccacaggcctgccccaggcacctggggctctgaggcccctggggaggctgggcccagcagctgcccctggagaacacagacaaaggacttccccgcagggaactgtgccctatggagggatcagacagggctgggaacagccacagaggctgcgtgcctatggcacagcccttcctccgccgcacactccccctgggtcctcaggcccacccaagcgccgggctgcagaggaagcggggctggggaggctgcaggcatcagagacactggtggtggcggacccggccgccgggccccgtgctctcaggctagcccaggtcgtggaggctggcaggctcaggtcgggtgtgagacgtgccgtggctgcgctcagtccagcggggaggagccgttcagcccggcctccccaggaagccatatccccactcacccggtaagagaaccttgtcgtcccctttccatgctctcctaggacacgagcccaggaaccccagacccagggggaggaagggtggaggggccccaggggtcaccatgtgcaccaggggccgtgaggggccggggcattcagctcagctctgaaccggggaagctggcacggcaaggactgcctcaggtgacgggccgtgagaggggacgggtcaggagccttcccaagccttctcctcagcccgacacccatggccatcggaggctaggatgccagacacagccatttgcagaaatcaggcacagtgactgcagctcacgtccagccaaccaagcatggggccgcagctcaggaagtcccttcccgccacaccacagcctaattcttactgggacggaggcaactcggctacgctgggcaggacgacaaacacgagacgccactgtggaatgagcaacttcggagcacggggtgacttgcttgggaccgtgcccacgtgacagccccttatgcagaggaggaaagagaagccccgagtgggaggggaacctgtccaaagtcacacggtgtgtgggtgacacagctggggtgagtcgaggctggcccctgaggcccatgctccctgaacgctggagaccactgtcggctagcagcggctctcagggaaggcctggtctccaccctcccagcctagcctcgcggaccctcgtcctccccacatcggacctgctcacctgcctggaccctgggctgccagatgcaggaagcatcaaaccccccagcctcgtgggtgcggggcagggcgcaggcagcacagcttagatgccctggtttgtccctcttgtctcctgggaagagcttgctcccgcccagctctcctgccactggcctttcagggttgggctgggcccagagtgccttttagtcgcttctcacggtggcctgatggctcaacccagtcccaaacgggcccagtgacactgccgactgcgccccagctcaggcccccactgcaccagcaatgctagaaaaccaagccaataaaagtgatttcttttttcattaaaaaaaaaaaaaaaaaattttttaaaaaaaaaaaagggcggccgct

SEQ ID NO: 7817 - DNA, 1317 bp, Homo sapiens
  misc_feature (1240)..(1308): n is a, c, g, or t
ctgggtggggagctctggaggcggggcttcgagcgtggctcgtgggttttccgtgaagtcgcggtgcagcggtgggcggcatgtctgtggccggtggggagattcgtggggacacggggggagaggacactgctgctcccggccggttcagcttcagcccggagcccacgctcgaggacatccgccgcctccatgctgagtttgctgcggaacgagactgggaacagttccatcagcctcggaatctcctcctggccttggttggggaagtgggggagctggcagaactctttcagtggaaaaccgatggggaacctggcccccaaggctggtcccccagggaacgggcagcccttcaagaggagcttagtgacgtcctcatctacctggtggcattagcagcccgctgccgtgtggatctgccgctagcagtgctctccaaaatggacatcaaccggcgacgctacccagcccatctggcccgcagctcttcccgcaagtatacagaattgccccatggggccatctctgaagaccaggctgtggggcctgcggacattccctgtgactccacaggccagacctcaacctagaaagatggccacaggacttgcaactcagggtggtgtctgaagagcagagagtggcctggccctggagcctttttctagtcttttcagaatagatcatgggcctgaggcctccacttcttgaggtctgaggcccagcagcctctagaaggtagcctcctggtgtttgttctcccagtaaaatggttttgggcgataacttctagattattcctggatggccagggaggctctctgtctcagcaggtgatgacgggggtaccaggggtgcctctgagacccattctcgtgtttccctgttgtaccttttgcctgcagggcagagagatctggtttctagcaaattcccagtaggatgtcatgtaagttccttccccctcttagagattgaaggctgtaagagtccagatggtggagccaggctgtctgggttcaaatgccatctttgacacttgcaagctaaatgacattactcaaattaatcgttctgcacttcagcttccttgtctatcaaataaaaagaatagtacctgcccaaaaaaaaaaaaaaaaaaaaaaaaaaaaaaaaaaaaaaaatacaggccggcgctataaatacacttgagggacagtttaggaacccatttgtgcagacggagcccaagaagggnnnnnnnnnnnnnnnnnnnnnnnnnnnnnnnnnnnnnnnnnnnnnnnnnnnnnnnnnnnnnnnnnnnnncgcccgttg

SEQ ID NO: 7818 - DNA, 1785 bp, Homo sapiens
gcctgagtcacgagcggcacgaggatttccagctcagcgatgcccccaggtccctgggagagctgcttctgggtggggggcctcattttgtggctcagcgttggaagttcaggggatgcacctcctaccccacagccaaagtgcgctgacttccagagcgccaacctttttgaaggcaccgatctcaaagtccagtttctcctctttgtcccttcgaatcctagctgtgggcagctagtagaaggaagcagtgacctccaaaactctgggttcaatgccactctgggaaccaaactaattatccatggattcagggttttaggaacaaagccttcctggattgacacatttattagaacccttctgcgtgcaacgaatgctaatgtgattgccgtggactggatttatgggtctacaggagtctacttctcagctgtgaaaaatgtgattaagttgagcctcgagatctcccttttcctcaataaactcctggtgctgggtgtgtcggaatcctcaatccacatcattggtgttagcctgggggcccacgttgggggcatggtgggacagctcttcggaggccagctgggacagatcacaggcctggaccccgctggacctgagtacaccagggccagtgtggaagagcgcttggatgctggagatgccctcttcgtggaagccatccacacagacaccgacaatttgggtattcggattcccgttggacatgtggactacttcgtcaacggaggccaagaccaacctggctgccccaccttcttttacgcaggttatagttatctgatctgtgatcacatgagggctgtgcacctctacatcagcgccctggagaattcctgtccactgatggcctttccctgtgccagctacaaggccttccttgctggacgctgtctggattgctttaacccttttctgctttcctgcccaaggataggactggtggaacaaggtggtgtcaagatagagccgctccccaaggaagtgaaagtctacctcctgactacttccagtgctccgtactgcatgcatcacagcctcgtggagtttcacttgaaggaactgagaaacaaggacaccaacatcgaggttaccttccttagcagtaacatcacctcttcatctaagatcaccatacctaagcagcaacgctatgggaaaggaatcatagcccatgccaccccacaatgccagataaaccaagtgaaattcaagtttcagtcttccaaccgagtttggaaaaaagaccggactaccattattgggaagttctgcactgcccttttgcctgtcaatgacagagaaaagatggtctgcttacctgaaccagtgaacttacaagcaagtgtgactgtttcctgtgacctgaagatagcctgtgtgtagtttaacctgggcaggacacatctccctgcattttttttttttttttttgagagagaggtgtgatgagggatgtgtgtgtgcagcttattgtagaccattactactaaggagaaaagcaaagctctttcttattttcctcataatcagctaccctggaggggagggagaactcattttacagaacttggtttcctttgccgatcttatgtacatacccattttagctttcccatgcatacttaactgcacttgctttatctccttgggcattcgtacttaggattcaatagaaacatgtacagggtaaacaattttttaaaaataaaacttcatggagtaaaaaaaaaaaaaaaaaaaaaaaaaaaaaaaaaaaaa

SEQ ID NO: 7819 - DNA, 7192 bp, Homo sapiens
  misc_feature (165)..(183): n is a, c, g, or t
  misc_feature (579)..(599): n is a, c, g, or t
  misc_feature (1017)..(1059): n is a, c, g, or t
cagagatcgcgagcgaggcaccagcctgcagccggcccccagcacatcctcagccgcacagacactcggcgaggtggaggtgagggcgggcgccagcgaactcggagaggggctcgctcactcccaggcgatcccagccgccaccgccgccgcaccagcagcagnnnnnnnnnnnnnnnnnnncttcctcagactcccctcgagaggctggccaagcgggtgtagccgttgggggaggctcccgccgggggaacccggcgaggacaagagcagggcggccgccttccactcgggctgtccggcggcggctgcctccgcccgtgtgtccgtcaagggtgccgcgggatgtgtgtcagtttacgcctctgagatcacacagctgcctgggggccgtgtgatgcccaaggcaagtctcggttttaattattattattatcattattgttacgcttggctttcgggaaatactcgtgatatttgtaggataaaggaaatgacactttgaggaactggagagaacatatatgcgttttgtttttaagaggaaaaccgtgttctcttcccggcttgttccctctnnnnnnnnnnnnnnnnnnnnnctcctcctggtgaggtggaaattccagcaagaatagaggtgaagacaagccaccaggactcaggagggaaacgctgaccattagaaacctctgcataagacgttgtaaggaggaaaataaaggagagaaaaacacaaagatttaaacaagaaacctacgaacccagctctggaaagagccaccttctccaaaatggatatgtttcctctcacctgggttttcttagccctctacttttcaagacaccaagtgagaggccaaccagacccaccgtgcggaggtcgtttgaattccaaagatgctggctatatcacctctcccggttacccccaggactacccctcccaccagaactgcgagtggattgtttacgcccccgaacccaaccagaagattgtcctcaacttcaaccctcacnnnnnnnnnnnnnnnnnnnnnnnnnnnnnnnnnnnnnnnnnnntcgagattcgggatggggacagtgaatccgcagacctcctgggcaaacactgtgggaacatcgccccgcccaccatcatctcctcgggctccatgctctacatcaagttcacctccgactacgcccggcagggggcaggcttctctctgcgctacgagatcttcaagacaggctctgaagattgctcaaaaaacttcacaagccccaacgggaccatcgaatctcctgggtttcctgagaagtatccacacaacttggactgcacctttaccatcctggccaaacccaagatggagatcatcctgcagttcctgatctttgacctggagcatgaccctttgcaggtgggagagggggactgcaagtacgattggctggacatctgggatggcattccacatgttggccccctgattggcaagtactgtgggaccaaaacaccctctgaacttcgttcatcgacggggatcctctccctgacctttcacacggacatggcggtggccaaggatggcttctctgcgcgttactacctggtccaccaagagccactagagaactttcagtgcaatgttcctctgggcatggagtctggccggattgctaatgaacagatcagtgcctcatctacctactctgatgggaggtggacccctcaacaaagccggctccatggtgatgacaatggctggacccccaacttggattccaacaaggagtatctccaggtggacctgcgctttttaaccatgctcacggccatcgcaacacagggagcgatttccagggaaacacagaatggctactacgtcaaatcctacaagctggaagtcagcactaatggagaggactggatggtgtaccggcatggcaaaaaccacaaggtatttcaagccaacaacgatgcaactgaggtggttctgaacaagctccacgctccactgctgacaaggtttgttagaatccgccctcagacctggcactcaggtatcgccctccggctggagctcttcggctgccgggtcacagatgctccctgctccaacatgctggggatgctctcaggcctcattgcagactcccagatctccgcctcttccacccaggaatacctctggagccccagtgcagcccgcctggtcagcagccgctcgggctggttccctcgaatccctcaggcccagcccggtgaggagtggcttcaggtagatctgggaacacccaagacagtgaaaggtgtcatcatccagggagcccgcggaggagacagtatcactgctgtggaagccagagcatttgtgcgcaagttcaaagtctcctacagcctaaacggcaaggactgggaatacattcaggaccccaggacccagcagccaaagctgttcgaagggaacatgcactatgacacccctgacatccgaaggtttgaccccattccggcacagtatgtgcgggtatacccggagaggtggtcgccggcggggattgggatgcggctggaggtgctgggctgtgactggacagactccaagcccacggtagagacgctgggacccactgtgaagagcgaagagacaaccaccccctaccccaccgaagaggaggccacagagtgtggggagaactgcagctttgaggatgacaaagatttgcagctcccttcgggattcaattgcaacttcgatttcctcgaggagccctgtggttggatgtatgaccatgccaagtggctccggaccacctgggccagcagctccagcccaaacgaccggacgtttccagatgacaggaatttcttgcggctgcagagtgacagccagagagagggccagtatgcccggctcatcagcccccctgtccacctgccccgaagcccggtgtgcatggagttccagtaccaggccacgggcggccgcggggtggcgctgcaggtggtgcgggaagccagccaggagagcaagttgctgtgggtcatccgtgaggaccagggcggcgagtggaagcacgggcggatcatcctgcccagctacgacatggagtaccagattgtgttcgaagggagtgatagggaaaggacgttccggagagattgccattgatgacattcggataagcactgatgtcccactggagaactgcatggaacccatctcggcttttgcagtggaaagtgacatcccagaaatacatgagagagaaggatatgaagatgaaattgatgatgaatacgaggtggactggagcaattcttcttctgcaacctcagggtctggcgccccctcgaccgacaaagaaaagagctggctgtacaccctggatcccatcctcatcaccatcatcgccatgagctcactgggcgtcctcctgggggccacctgtgcaggcctcctgctctactgcacctgttcctactcgggcctgagctcccgaagctgcaccacactggagaactacaacttcgagctctacgatggccttaagcacaaggtcaagatgaaccaccaaaagtgctgctccgaggcatgacggattgcacctgaatcctatctgacgtttcattccagcaagaggggctggggaagattacatttttttttcctttggaaactgaatgccataatctcgatcaaaccgatccagaataccgaaggtatggacaggacagaaaagcgagtcgcaggaggaagggagatgcagccgcacaggggatgattaccctcctaggaccgcggtggctaagtcattgcaggaacggggctgtgttctctgctgggacaaaacaggagctcatctctttggggtcacagttctattttgtttgtgagtttgtattattattattattattattattatattttatttctttggtctgtgagcaactcaaagaggcagaagaggagaatgacttttccagaatagaagtggagcagtgatcattattctccgctttctctttctaatcaacacttgaaaagcaaagtgtcttttcagcctttccatctttacaaataaaactcaaaaaagccgtccagcttatcccatcctctgattgtcttctgacttaagggatttactgtggtgtaggttctgccagccaaccctacaagctgccatttccagtcctagcatttaagtaggatgttgttgcctttaacttttcttatccaggggaaaattgccattttagggtcagcatgaacagctctttcttgtatgcgatttaaaacaaactggaaaggaaacttcacacgtcaaaatccatagaagcgcctggacgaggcttaaagtgctttgtgagtgaataggagccattcgctaattctagacccacagtgtctggtggtggggcttcccttgtggggcttctggtggtggttctgccttttcttttccctcctccatgttcttctaaaacatatacatatatacatacacacatacacatattcttcaggtctctaagcccctggaagcagcattgtgtgatattctcagaggcaggggaaaatagagggaaaaatagagactattggtatgttctccccatcagcgagttattgtaactggtcaccactggacgggaaggagaacagaggagagggaaagagaagcccaacctctgtgatcatatgagggccaaggctgagcagtgtagacagagaccctttgaaatgcatttgtctctcaaatagactagtaaacaccgacttctcctttgggttacaaacaccatttcaacctttcgggagagtcagagctaggatgtacaagaactgattctaaccagaagtccgcaagtactgtggacaagaatgcttaaccatgctgcttcagccttgagagacctaggttcttacacatatgcacacacgcatacacacatgcacgcacacacacatacacacatgcacgcacgcacgcatgcacaccaatttatgtttttattaagtgccttgaaaaaatgaagaaaaatgtattttccctttatgtaaaaattagtgaatatcttatgaattaaggcattcctctttccctaaccccgatggctccattcccaagtaccccaactcactgctgatcctattaaaggaatgagtcctgctacccgagtggtagtcatagccctagatgactctcaactactcttcaaagggaggcatcaggaatagaatgaaactgtgtgaaggataagattgttcgcatcaagatccaaatcttgatttcatattaacgcctaaggattgcctgtgtgctggaaatatatttgaaactcaaccagtatgcccagcctattgcatatcattgtcagaccatttttgctgctgtggtcacccacgatttcatttgtcttatacccaggtgaaaggggaagggtgaatgggactggctggttcctttaaatgttaacttatggaaatgctagttcaaatggtaatgtcacagtgttttgtatgcagagagcaagagttcaaccaacagctgtttattcatgtgtgtgtgtctttgctgctttgagttctctgtatctactgtgtatgtgaatggtcatgtgggactcagtggtggtgttgtgactttgacctagggtccgagtgtcacagctgatcttggcactcggcactcattggcacagtggtagttagaggtgaaaagtagagctgtcaagcccaagggcttagctttagggctcctcctgagttcggcccacagtagaagcaagattttaactagccccttttcctcttcaccctcccatgatgcgcagtgttcagaaagctggtaagtcctagggatttccagaagtagcctgcagaagaaggtaagtttgaaagccactccaggggtcctgatgctgtcatgctcagtgagccattttacagttctccaaagtctagccctgtttcggacctgcacttcacctctaagttatgtacaactcaacctgcatccctctaaaagtcctatatccatattcaccattggctaatttgaggccctgagtgggccttgaatgctaaaaagaagcagggtacgcagggctacatgtagataccacaccaaggctggaggctggtctgtcgtaagacagaaagaaagacgctgggcccaattttgacttggccaggggacaccttggtgtgtttgttatctttatctgtgggtaggctagctgacccatctccttgagtcattccctttgggaaaccccactgccagtattgatctcctttttgccttgtactgaatgacacattacctccacactctcccggactaggtggtcaacagggccacagggttgctttctgtctttggtggggcaggggagttgacagggatgagggtccaaggaataagcatgaatgacaagaaaacaagggaaagagttaacctgtcacatagcaggttaactttttcagggtttgcagttagaggtattcgaccattcactggctgagccagatcacgggaacttgagagcttttactgtgattcttcaatgtaaaaaataaacaacaatgtcaaactgtgtttatatgatttgtataaagcctttttaagattactatttaaataaacattataccagagataaaaaaaaaaaaagaaaaaaaaaaaaaaaaaaaaaaaaaaaaaaaaaaaaaaaaaaaaaaaaaaaaaaaaaaaaaaaaaaaaaaaaaaaagggggggggggggtaatcccggggggggcccacactagaggacaactccaccggatgtttttgatgtaaaaggggtggtgcccacataatatgggggggtgtttatattatataatacatacagggcggaggcgcgtcgttttcataactacagccgtcgtgttggatggaaacaaaaaactacgtgatagtgactgattttgatttgtgaaaaacgagacaccccctatatgttgtggggggcggacgaaaacatttagtgggagaacaacctttatactgctagcagtagattttacagcagcctcgtcagcgaggattaacattaaatctttgaaggttgtaagtggtgggtcgcaacacacaccgtgaatatttattgtctggtctgatgaaaagaggtgctgcccatgctgatgattttatagaaaaaatattctcacggg

SEQ ID NO: 7820 - DNA, 3716 bp, Homo sapiens
  misc_feature (1177)..(1200): n is a, c, g, or t
  misc_feature (1570)..(1585): n is a, c, g, or t
agtcccagcccaagggtagctggaggcgcgcaggccggctccgctccggccccggacgatgcggcgcgcccaggatgctgccgtgcctcgtagtgctgctggcggcgctcctcagcctccgtcttggctcagacgctcatgggacagagctgcccagccctccgtctgtgtggtttgaagcagaatttttccaccacatcctccactggacacccatcccaaatcagtctgaaagtacctgctatgaagtggcgctcctgaggtatggaatagagtcctggaactccatctccaactgtagccagaccctgtcctatgaccttaccgcagtgaccttggacctgtaccacagcaatggctaccgggccagagtgcgggctgtggacggcagccggcactccaactggaccgtcaccaacacccgcttctctgtggatgaagtgactctgacagttggcagtgtgaacctagagatccacaatggcttcatcctcgggaagattcagctacccaggcccaagatggcccccgcaaatgacacatatgaaagcatcttcagtcacttccgagagtatgagattgccattcgcaaggtgccgggaaacttcacgttcacacacaagaaagtaaaacatgaaaacttcagcctcctaacctctggagaagtgggagagttctgtgtccaggtgaaaccatctgtcgcttcccgaagtaacaaggggatgtggtctaaagaggagtgcatctccctcaccaggcagtatttcaccgtgaccaacgtcatcatcttctttgcctttgtcctgctgctctccggagccctcgcctactgcctggccctccagctgtatgtgcggcgccgaaagaagctacccagtgtcctgctcttcaagaagcccagccccttcatcttcatcagccagcgtccctccccagagacccaagacaccatccacccgcttgatgaggaggcctttttgaaggtgtccccagagctgaagaacttggacctgcacggcagcacagacagtggctttggcagcaccaagccatccctgcagactgaagagccccagttcctcctccctgaccctcacccccaggctgacagaacgctgggaaacggggagccccctgtgctgggggacagctgcagtagtggcagcagcaatagcannnnnnnnnnnnnnnnnnnnnnnngcaggagcccagcctgagccccagcacagggcccacctgggagcaacaggtggggagcaacagcaggggccaggatgacagtggcattgacttagttcaaaactctgagggccgggctggggacacacagggtggctcggccttgggccaccacagtcccccggagcctgaggtgcctggggaagaagacccagctgctgtggcattccagggttacctgaggcagaccagatgtgctgaagagaaggcaaccaagacaggctgcctggaggaagaatcgcccttgacagatggccttggccccaaattcgggagatgcctggttgatgaggcaggcttgcatccaccagccctggccaagggctatttnnnnnnnnnnnnnnnngaaatgactctggcttcctcaggggccccaacgggacagtggaaccagcccactgaggaatggtcactcctggccttgagcagctgcagtgacctgggaatatctgactggagctttgcccatgaccttgcccctctaggctgtgtggcagccccaggtggtctcctgggcagctttaactcagacctggtcaccctgcccctcatctctagcctgcagtcaagtgagtgactcgggctgagaggctgcttttgattttagccatgcctgctcctctgcctggaccaggaggagggcccctggggcagaagttaggcacgaggcagtctgggcacttttctgcaagtccactggggctggccccagccaggccctgcagggctggtcagggtgtctggggcaggaggaggccaactcactgaactagtgcagggtatgtgggtggcactgacctgttctgttgactggggccctgcagactctggcagagctgagaagggcagggaccttctccctcctaggaactctttcctgtatcataaaggattatttgctcaggggaaccatggggctttctggagttgtggtgaggccaccaggctgaagtcagctcagacccagacctccctgcttaggccactcgagcatcagagcttccagcaggaggaagggctgtaggaatggaagcttcagggccttgctgctggggtcatttttaggggaaaaaggaggatatgatggtcacatggggaacctcccctcatcgggcctctggggcaggaagcttgtcactggaagatcttaaggtatatattttctggacactcaaacacatcataatggattcactgaggggagacaaagggagccgagaccctggatggggcttccagctcagaacccatccctctggtgggtacctctggcacccatctgcaaatatctccctctctccaacaaatggagtagcatccccctggggcacttgctgaggccaagccactcacatcctcactttgctgccccaccatcttgctgacaacttccagagaagccatggttttttgtattggtcataactcagccctttgggcggcctctgggcttgggcaccagctcatgccagccccagagggtcagggttggaggcctgtgcttgtgtttgctgctaatgtccagctacagacccagaggataagccactgggcactgggctggggtccctgccttgttggtgttcagctgtgtgattttggactagccacttgtcagagggcctcaatctcccatctgtgaaataaggactccacctttaggggaccctccatgtttgctgggtattagccaagctggtcctgggagaatgcagatactgtccgtggactaccaagctggcttgtttcttatgccagaggctaacagatccaatgggagtccatggtgtcatgccaagacagtatcagacacagccccagaagggggcattatgggccctgcctccccataggccatttggactctgccttcaaacaaaggcagttcagtccacaggcatggaagctgtgaggggacaggcctgtgcgtgccatccagagtcatctcagccctgcctttctctggagcattctgaaaacagatattctggcccagggaatccagccatgacccccacccctctgccaaagtactcttaggtgccagtctggtaactgaactccctctggaggcaggcttgagggaggattcctcagggttcccttgaaagctttatttatttattttgttcatttatttattggagaggcagcattgcacagtgaaagaattctggatatctcaggagccccgaaattctagctctgactttgctgtttccagtggtatgaccttggagaagtcacttatcctcttggagcctcagtttcctcatctgcagaataatgactgacttgtctaattcgtagggatgtgaggttctgctgaggaaatgggtatgaatgtgccttgaacacaaagctctgtcaataagtgatacatgttttttattccaataaattgtcaagaccacaaaaaaaaaaaaaaaaaaaaaaaaaaaaaaaaaaaaaaaaaaaaaaaaaaaaaaaaaaaaaaa

SEQ ID NO: 7821 - DNA, 2577 bp, Homo sapiens
  misc_feature (2408)..(2411): n is a, c, g, or t
gggcggggtctggacgcgtcgcggtttccgcttccgctccctcacagctcccgtcccgttaccgcctcctggccggcctcgcgcctttcaccggcacgagggtcccgcgccgcggggcctgctcctgccgcgcgcacccccggggcttcggctccggcacgggtcgcgcccagctttcctgcacctgaggccgccggccagccgccgccatgggtgcctacctctcccagcccaacacggtgaagtgctccggggacggggtcggcgccccgcgcctgccgctgccctacggcttctccgccatgcaaggctggcgcgtctccatggaggatgctcacaactgtattcctgagctggacagtgagacagccatgttttctgtctacgatggacatggaggggaggaagttgccttgtactgtgccaaatatcttcctgatatcatcaaagatcagaaggcctacaaggaaggcaagctacagaaggctttagaagatgccttcttggctattgacgccaaattgaccactgaagaagtcattaaagagctggcacagattgcagggcgacccactgaggatgaagatgaaaaagaaaaagtagctgatgaagatgatgtggacaatgaggaggctgcactgctgcatgaagaggctaccatgactatttgatgagctgctgacacgctacgggcagaactgtcacaagggccctccccacagcaaatctggaggtgggacaggcgaggaaccagggtcccagggcctcaatggggaggcaggacctgaggactcaactagggaaactccttcacaagaaaatggccccacagccaaggcctacacaggcttttcctccaactcggaacgtgggactgaggcaggccaagttggtgagcctggcattcccactggtgaggctgggccttcctgctcttcagcctctgacaagctgcctcgagttgctaagtccaagttctttgaggacagtgaggatgagtcagatgaggcggaggaagaagaggaagacagtgaggaatgcagcgaggaagaggatggctacagcagtgaggaggcagagaatgaggaagatgaggatgacaccgaggaggctgaagaggacgatgaagaagaagaagaagagatgatggtgccagggatggaaggcaaagaggagcctggctctgacagtggtacaacagcggtggtggccctgatacgagggaagcagttgattgtagccaacgcaggagactctcgctgtgtggtatctgaggctggcaaagctttagacatgtcctatgatcacaaaccagaggatgaagtagaactagcacgcatcaagaatgctggtggcaaggtcaccatggatgggcgagtcaacgggggcctcaacctctccagagccattggggaccacttctataagagaaacaagaacctgccacctgaggaacagatgatttcagcccttcctgactatcaaggtgctgactctcactgacgaccatgaattcatggtcattgcctgtgatggcatctggaatgtgatgagcagccaggaagttgtagatttcattcaatcaaagatcagccagcgtgatgaaaatggggagcttcggttattgtcatccattgtggaagagctgctggatcagtgcctggcaccagacacttctggggatggtacagggtgtgacaacatgacctgcatcatcatttgcttcaagccccgaaacacagcagagctccagccagagagtggcaagcgaaaactagaggaggtgctctctactgagggggctgaagaaaatggcaacagcgacaagaagaagaaggccaagcgagactagcagtcatccagacccctgcccacctagactgttttctgagccctccggacctgagactgagttttgtctttttcctttagccttagcagtgggtatgaggtgtgcagggggagctgggtggcttcactccgcccattccaaagagggctctccctccacactgcagccgggagcctctgctgtccttcccagccgcctctgctcctcgggctcatcaccggttctgtgcctgtgctctgttgtgttggagggaaggactggcggttctggtttttactctgtgaactttatttaaggacattcttttttattggcggctccatggccctcggccgcttgcacccgctctctgttgtacactttcaatcaacactttttcagactaaaggccaaaacctaaaaaaaaaaaaaaaaaaaaaaaaaactgcccccccccgtaaaccgattacccccaccaccccaatcttatctgtcacttatgctcccctacttttcccccccacccaccgaggggggcgcgccccaaacaaaaaataaaccccccgggggggggccnnnncaaaattttcccggcgcacccccccacattctctttgtttgtaaaagagggggccccctatataagggtggggccccctcttattaaaaacctttggcgccctgttgtgcctctctctttattatttcacccacaccgtcctttggataatttggaggaaaaaaaa

SEQ ID NO: 7822 - DNA, 2044 bp, Homo sapiens
  misc_feature (1673)..(1679): n is a, c, g, or t
  misc_feature (2040)..(2040): n is a, c, g, or t
cccacgcgtccgcaagtcagtcgatcctgtgtttgtgctcccgaaggacttggcgacttggctaacaaggagacatttgttatttcatttcctcatccattattcatgcagtgagagatggtcacaagaacaaagaaaatatttgtaggcgggttatctgcgaacacagtagtggaagatgtaaagcaatatttcgagcagtttggcaaggtggaagatgcaatgctgatgtttgataaaactaccaacaggcacagagggtttggctttgtcacttttgagaatgaagatgttgtggagaaagtctgtgagattcatttccatgaaatcaataataaaatggtagaatgtaagaaagctcagccgaaagaagtcatgttcccacctgggacaagaggccgggcccggggactgccttacaccatggacgcgttcatgcttggcatggggatgctgggatatcccaacttcgtggcgacctatggccgtggctaccccggatttgctccaagctatggctatcagttcccagactatttgccggtttcacaagacataatttttatcaactagctcttaagagaggcatagcaaagtgggggttgctaccatttctagagagagaggacacagtcccggcctgggctgcccccgctccagtcaatgctcactgaaagtctgtcttagctgcctgtttgaatgactgttctttttctcatttttaattcttggactcatgtcctcattgcttcactcaattaaaaaaaaattattctccagtcccctcccactttgcttcttgtatgcattgtgaccgaccccacttcctcagaatgtaacggggccagagggaaacttctcacaaacttcgtagagcctcctcaggggaagctaggaagaagacatcaaatgtttttaagtcatgaccaaacaggcttgttggggacatatcatggggtgagctttgaagtgctggtggtccagaggggttgcagatacgtgacttggagcacccgtgtcttacgatggacagtgataaaggtgaacacacagagacagactattctctaagaatgtgagaaacctgatctggaagaggagctatataaacactatctgactatctttgtcttttggggccagtggctgttggcataatcacaagcctgtctgtcttcgagaagggacagtggagtcatccaggtgctgccacatgacaggcacggtgggcaccgatccacagtgggccccgccttccccagctcgcctccctgcctgtgctggcctggccttgcctgctggcaccattggagtaggagggggtggaacacagggggcccatcctgatcaggccccatctcaaggttggcactcctgcccatcacccttagaaggatcttttcccatggcttgacttccttcatttccctaactgaaatacacccactctcttggaataatgacgtaccactcagttggaccctcaagagtcactgctttgtctgtgctggtagtttgtgagaagtgacccgcacgcttccatttgatgcatttgatgtgagtgaatccatacatttgaatgtcattgtccttgagaccctacatgtgcagtttggctcatctcattaaagatgcttgatgtaaaaaaaaaaaaaaaaaaaaaaaaaaaaaannnnnnntttccatgagtattatttttttcaaagaacaaatctgtatggcttttccccatctccatattttgttttgctatgaattgctttgctttggtgaacttgtcctagtatgcttgcctcacaaacgttttagccattgtgaattttcttcatctctgtaaatagttcatctgtgcttctccctgatgacgttttattttttttcccctgtaagcaaccgaggtagaaaaataaattgtttaccatggacatactgtgtgctgccgtctcttagcctgacagtgtcctgttctcgctccgggggaggtgaatgcactgaataatgttcaccgatgacagcctagtgcagtttctaaaagcatgngaaa

SEQ ID NO: 7823 - DNA, 2667 bp, Homo sapiens
  misc_feature (2515)..(2596): n is a, c, g, or t
  misc_feature (2598)..(2640): n is a, c, g, or t
ttcaagggacgtcattcatttcccccagtgaccttgacaagtcagaagcttgaaagcagggaaatccggatgtctcggttatgaagtggagcagtgagtgtgagcctcaacatagttccagaactctccatccggactagttattgagcatctgcctctcatatcaccagtggccatctgaggtgtttccctggctctgaaggggtaggcacgatggccaggtgcttcagcctggtgttgcttctcacttccatctggaccacgaggctcctggtccaaggctctttgcgtgcagaagagctttccatccaggtgtcatgcagaattatggggatcacccttgtgagcaaaaaggcgaaccagcagctgaatttcacagaagctaaggaggcctgtaggctgctgggactaagtttggccggcaaggaccaagttgaaacagccttgaaagctagctttgaaacttgcagctatggctgggttggagatggattcgtggtcatctctaggattagcccaaaccccaagtgtgggaaaaatggggtgggtgtcctgatttggaaggttccagtgagccgacagtttgcagcctattgttacaactcatctgatacttggactaactcgtgcattccagaaattatcaccaccaaagatcccatattcaacactcaaactgcaacacaaacaacagaatttattgtcagtgacagtacctactcggtggcatccccttactctacaatacctgcccctactactactcctcctgctccagcttccacttctattccacggagaaaaaaattgatttgtgtcacagaagtttttatggaaactagcaccatgtctacagaaactgaaccatttgttgaaaataaagcagcattcaagaatgaagctgctgggtttggaggtgtccccacggctctgctagtgcttgctctcctcttctttggtgctgcagctggtcttggattttgctatgtcaaaaggtatgtgaaggccttcccttttacaaacaagaatcagcagaaggaaatgatcgaaaccaaagtagtaaaggaggagaaggccaatgatagcaaccctaatgaggaatcaaagaaaactgataaaaacccagaagagtccaagagtccaagcaaaactaccgtgcgatgcctggaagctgaagtttagatgagacagaaatgaggagacacacctgaggctggtttctttcatgctccttaccctgccccagctggggaaatcaaaagggccaaagaaccaaagaagaaagtccacccttggttcctaactggaatcagctcaggactgccattggactatggagtgcaccaaagagaatgcccttctccttattgtaaccctgtctggatcctatcctcctacctccaaagcttcccacggcctttctagcctggctatgtcctaataatatcccactgggagaaaggagttttgcaaagtgcaaggacctaaaacatctcatcagtatccagtggtaaaaaggcctcctggctgtctgaggctaggtgggttgaaagccaaggagtcactgagaccaaggctttctctactgattccgcagctcagaccctttcttcagctctgaaagagaaacacgtatcccacctgacatgtccttctgagcccggtaagagcaaaagaatggcagaaaagtttagcccctgaaagccatggagattctcataacttgagacctaatctctgtaaagctaaaataaagaaatagaacaaggctgaggatacgacagtacactgtcagcagggactgtaaacacagacagggtcaaagtgttttctctgaacacattgagttggaatcactgtttagaacacacacacttactttttctggtctctaccactgctgatattttctctaggaaatatacttttacaagtaacaaaaataaaaactcttataaatttctatttttatctgagttacagaaatgattactaaggaagattactcagtaatttgtttaaaaagtaataaaattcaacaaacatttgctgaatagctactatatgtcaagtgctgtgcaaggtattacactctgtaattgaatattattcctcaaaaaattgcacatagtagaacgctatctgggaagctatttttttcagttttgatatttctagcttatctacttccaaactaatttttatttttgctgagactaatcttattcattttctctaatatggcaaccattataaccttaatttattattaacatacctaagaagtacattgttacctctatataccaaagcacattttaaaagtgccattaacaaatgtatcactagccctcctttttccaacaagaagggactgagagatgcagaaatatttgtgacaaaaaattaaagcatttagaaaaaaaaaaaaaaaaaaaaaaaaaaaaaaaaaaaaaaaaaaaaaaaaaaaaattataaaaaaaaaaaaaaaaaaaaaaaccatgtcggccgcctnnnnnnnnnnnnnnnnnnnnnnnnnnnnnnnnnnnnnnnnnnnnnnnnnnnnnnnnnnnnnnnnnnnnnnnnnnnnnnnnnncnnnnnnnnnnnnnnnnnnnnnnnnnnnnnnnnnnnnnnnnnnnggcgtaatagcgaaggcccgccgttcg

SEQ ID NO: 7824 - DNA, 2957 bp, Homo sapiens
  misc_feature (1556)..(1649): n is a, c, g, or t
  misc_feature (1660)..(1754): n is a, c, g, or t
gtgtgagggtctttgagggtctttccccaggtaccagctctgacagcctgcccggcaccttggttcttggcaggggtacttggaggggcgcagtgggcgagcagcaggcgtgctgagcactggcagtgcccaggtcggcctggaatgagggctgcgcttccagaatgcccagggcgctggtggagaaccatgcctggtgctgtcagctgtgcttcactggctcctcatggcccacaggcacctcacccactcctgcagatgagccaggggtccacagagggataagccctgaatgcccagctgcccccgggacaaccatgccacagagttacaggaagcaagggggccgcagaagcccctctggtgggggcgcctcccatgagtgtgtgtgctgaccccagattggcagggcccaagtgccctgtgtcctggctttcaagagctcaggtgtgccccctccaaggcccagccatagcgatgagagcctggtgtccagctcttctgggtccgccccactcgtgggccccgggtggctgttcagtctctggtttagtaacagaaacgtctgtttcgaggaaagtgtgcctggaactctgcacatggcgtggagcagagcttcagggtcacgctcccgtgagttttgccacagcctggaggtggtttctgcctgggctgccagtagagctggcaagtccaggagtcacaacccttgtccctctcctgccaatgtgggtgggcccactgaggcctcagttacagctacatcagagcggacaccacgtcctggttccacccagctggcggtcaagggcccctctgtccagacaggagagaagcagggagtttggaaagcagagagcaagaggtggctggtctcagccctgtgacctgggccaggcctaggacgcccctgagcctcagtgttctgtctggacgagctgccctcctgcccccaccaagccctgatgtcaagccctctccctgcagggactgtgagagtgtctgcttcatcggccggccgtggcgtgtcgtggatggccacctgaaccttcctgtatgcaggggtatgatggaggccatgctgtaccacatcatgaccaggcctggcatccccgagagctccctgctgcgccactaccagggggtcctgcagcccgtcgccgtgctggagttgctccaggtgtggggccttcctgggttcagcagggtgtggaggcggctgggtgcactcagtggcccggctgtgatgttcaggccccaggcaacatgcagtaccaccatactgcttgcctgcacctcctcccccagcttgtcctgggctcctgcctctcaggctgtccctcagtgtccttcaccagctccatgctgctgaccaggctggaagatggggtgcccggggtgcttgtctctgatgttttctctgtgccaggggtcactaactcatgagtccgccgggccccacgggtcaagcagctgccccctggtgcagctgcttcctgcttggctgactcccatgtgtgcctggggcctccagctcctctggcagctaggagctnnnnnnnnnnnnnnnnnnnnnnnnnnnnnnnnnnnnnnnnnnnnnnnnnnnnnnnnnnnnnnnnnnnnnnnnnnnnnnnnnnnnnnnnnnnnnngcgctgcaggnnnnnnnnnnnnnnnnnnnnnnnnnnnnnnnnnnnnnnnnnnnnnnnnnnnnnnnnnnnnnnnnnnnnnnnnnnnnnnnnnnnnnnnnnnnnnnngcctttgcctgaaccctcctggtacatccccatctgcctcatgcccagttcaggtgccccctgctctgggaagtggctccctggtacagagggggcattccataaatgcttgaagaataaatcaacaagcaggcgagggcagtgccgctgtaacctgtgtgtctggtgtctccagggcctggagtccctcggctgcatccggaagcgctggctgagaaagccaaggcctgtctcgctcttctctacacccgtggtggaagaggtggaagtgccctccagcctggacgagagccccatggctttctatgagcccaccttggactgtaccctccggctgggccgtgtgttcccccacgaggtcaactggaacaagtggatccacctctaggacccctgtgggcgtcccctccctcccagccaccgcctgccacaccactcctgcctggtgctcggcagaccccactgtgccctggccttgggtctgccgagcctcctgcagcaggggacgggtgctttggccagagtcacagactgacacgtttcccactgtactggaactctggaaagaggggctccccgacctgcccatcccccaggctcttctgggccttccccttgggaactggcctcatcacactgggagttggtgcttcttgtctctgggtctccagagtttgccccgcctgtgcacacctcacattccagactctagccatctcggcaggatctcctggctccttgagtgcccaggtgccaccaagaggaagggccttgtgggatacaccttgcagaatagggatcggtgtgccccgctgcgaggggccccccatgggggctgtggcccctccgcaggcaggacatcccaacccctggctgggactgaaccacccagagcggagcggctcccttttcagccttgtgagtcacctggcaggccccagctgggctggctgtccgtgtccctcagcctggctggtgattccttgcaggccagaaatgaagagtccctgtaggttttggttttgtttgttttattttgttctttcaccttttttcctcattaaaaaaaaaaagtccctgtggagtgtacttatttattttttgattaaagggaagtaaaatgcaaaaaaacaaaacacgcagaacaaacaaattgctaaaacctcggaaagggaattcttatggtgttccgggggtgcggga

SEQ ID NO: 7825 - DNA, 1404 bp, Homo sapiens
cctctccccccgggctccgcccaccccacgccgggaacccacgcgggccactacaagcccgccctttcctacgtctggtccagtcggtcttcctccggcccgggccctggcccagctagccggccatggaaggtaatggccccgctgctgtccactaccagccggccagccccccgcgggacgcctgcgtctacagcagctgctactgtgaagaaaatatttggaagctctgtgaatacatcaaaaaccatgaccagtatcctttagaagaatgttatgctgtcttcatatctaatgagaggaagatgatacctatctggaaacaacaggcgagacctggagatggacctgtgatctgggattaccatgttgttttgcttcatgtttcaagtggaggacagaacttcatttatgatctcgatactgtcttgccatttccctgcctctttgacacttatgtagaagatgcctttaagtctgatgatgacattcacccacagtttaggaggaaatttagagtgatccgtgcagattcatatttgaagaactttgcttctgaccgatctcacatgaaagactccagtgggaattggagagagcctccgccgccatatccctgcattgagactggagattccaaaatgaacctgaacgatttcatcagtatggatcccaaggtaggatggggcgccgtctacacactatccgaatttacacatcggtttggcagtaaaaactgctgaacttggtctcaagatgtggaactgtggagaaattctaggacatgaacaagctatcctttcatcgaggacagcaaacattatggtacagttggcttggaattatgtctttctcttttaatttgattgagtggaaatctgagtgaatacaaatataaatgaacaacataaaaacttttgttttgacatgtcaaattgaaacttgataaagtgcgtacttgctaagatattcctgtggctcatgcgttacaacacgaggacttaagccagtaatcgtttttgttcagatagaggtgtggaggtagagccagcccctcatgtctgttttggatgttttgtgtctctccagctacattgtaagttccttgagggcagggccatggcccattgctctgtgaatctcaaatgcccataaaaggtgcccataaaatgttttcttgaacatttgaatgtgctgttgtctggaaaggggtaatattgtgagctgaatcagcaataagtattagtctttttggactatggtattgttaaaaagactgcagccctctcagacttgagcgttaattggcttatttatttatggctttaaataaaatcgatttaacgttaaaaaaaaaaaaaaaaaaaaaaaaaaaaaaaaaaaaaaaaaaaaaaaaaaaaaaaa

SEQ ID NO: 7826 - DNA, 2421 bp, Homo sapiens
  misc_feature (2136)..(2137): n is a, c, g, or t
  misc_feature (2143)..(2145): n is a, c, g, or t
  misc_feature (2147)..(2147): n is a, c, g, or t
  misc_feature (2167)..(2167): n is a, c, g, or t
  misc_feature (2170)..(2172): n is a, c, g, or t
  misc_feature (2175)..(2175): n is a, c, g, or t
  misc_feature (2177)..(2177): n is a, c, g, or t
aatcacagcagtgccgacgtcgtgggtgtttggtgtgaggctgcgagccgccgcgagttctcacggtcccgccggcgccaccaccgcggtcactcaccgccgccgccgccaccactgccaccacggtcgcctgccacagggtcttactctgttgcccaggctggagtgcagtggcacaatcttggctcactgcaacctctgcctcccgggttcaagcaattctcctgcctcagcctcccgagtagctgggattacaggtgtctgcaattgaactccaaggtgcagaatggtttggaaagtagctgtattcctcagtgtggccctgggcattggtgccgttcctatagatgatcctgaagatggaggcaagcactgggtggtgatcgtggcaggttcaaatggctggtataattataggcaccaggcagacgcgtgccatgcctaccagatcattcaccgcaatgggattcctgacgaacagatcgttgtgatgatgtacgatgacattgcttactctgaagacaatcccactccaggaattgtgatcaacaggcccaatggcacagatgtctatcagggagtcccgaagactacactggagaggatgttaccccacaaaatttccttgctgtgttgagaggcgatgcagaagcagtgaagggcataggatccggcaaagtcctgaagagtggcccccaggatcacgtgttcatttacttcactgaccatggatctactggaatactggtttttcccaatgaagatcttcatgtaaaggacctgaatgagaccatccattacatgtacaaacacaaaatgtaccgaaagatggtgttctacattgaagcctgtgagtctgggtccatgatgaaccacctgccggataacatcaatgtttatgcaactactgctgccaaccccagagagtcgtcctacgcctgttactatgatgagaagaggtccacgtacctgggggactggtacagcgtcaactggatggaagactcggacgtggaagatctgactaaagagaccctgcacaagcagtaccacctggtaaaatcgcacaccaacaccagccacgtcatgcagtatggaaacaaaacaatctccaccatgaaagtgatgcagtttcagggtatgaaacgcaaagccagttctcccgtccccctacctccagtcacacaccttgacctcacccccagccctgatgtgcctctcaccatcatgaaaaggaaactgatgaacaccaatgatctggaggagtccaggcagctcacggaggagatccagcgggatctggatgccaggcacctcattgagaagtcagtgcgtaagatcgtctccttgctggcagcgtccgaggctgaggtggagcagctcctgtccgagagagccccgctcacggggcacagctgctacccagaggccctgctgcacttccggacccactgcttcaactggcactcccccacgtacgagtatgcgttgagacatttgtacgtgctggtcaacctttgtgagaagccgtatccgcttcacaggataaaattgtccatggaccacgtgtgccttggtcactactgaagagctgcctcctggaagcttttccaagtgtgagcgccccaccgactgtgtgctgatcagagactggagaggtggagtgagaagtctccgctgctcgggccctcctggggagcccccgctccagggctcgctccaggaccttcttcacaagatgacttgctcgctgttacctgcttccccagtcttttctgaaaaactacaaattagggtgggaaaagctctgtattgagaagggtcatatttgctttctaggaggtttgttgttttgcctgttagttttgaggagcaggaagctcatgggggcttctgtagcccctctcaaaaggagtctttattctgagaatttgaagctgaaacctctttaaatcttcagaatgattttattgaagagggccgcaagccccaaatggaaaactgtttttagaaaatatgatgatttttgattgcttttgtatttaattctgcaggtgttcaagtcttaaaaaataaagatttataacagaacccaaaaaaaaaaaaaaaaaaaaaaaaaaaaaaaaaaaaaaaaannaaaaannnanaaaaaaaaaaaaaaaaaaanaannnaananggggggcgcccccctaaaaaaaccccccgagggggcccaattttagcggtaccccttttttttttgaaaaagggggcccccataggggggggcctatattaaatcctggcccctggcccccctttttaaaaaccctggacgtggaaaaaaagggcaccctgggggaaatttttggaagaaaccctcattcttgggggggggggaaatattggggggaaaattcctctcagggaatttttaacgg

SEQ ID NO: 7827 - DNA, 3070 bp, Homo sapiens; identical to SEQ ID NO: 7815
  misc_feature (20)..(50): n is a, c, g, or t
  misc_feature (2828)..(2839): n is a, c, g, or t
  misc_feature (2841)..(2863): n is a, c, g, or t
  misc_feature (2882)..(2886): n is a, c, g, or t
  misc_feature (2888)..(2890): n is a, c, g, or t
  misc_feature (2892)..(2901): n is a, c, g, or t
  misc_feature (2905)..(2906): n is a, c, g, or t
  misc_feature (2921)..(2923): n is a, c, g, or t
  misc_feature (2931)..(2932): n is a, c, g, or t
  misc_feature (2934)..(2934): n is a, c, g, or t
  misc_feature (2956)..(2957): n is a, c, g, or t
  misc_feature (2959)..(2959): n is a, c, g, or t

SEQ ID NO: 7828 - DNA, 1748 bp, Homo sapiens
tcagacctcatgagtcacttggactcttgagccacctctgggggtggagtctctctcctggcatctggacccttggtgctatcgacgaagcttgggtggggctcttagctgctatgtgcaagaggtgtgttccagggaaagcccctatctctctgcagaggtcaagtgaaagcgacggccgcagccaacagagttcaaaatgcaggcttggaaagtacagggggctctgtggaggatgggaaggactgatccacattcccaccaggaagtttagcagaacccccgcgtgccaactggaccccttggaaggacctggctcaggctggaccacctcttgagagggaggagctctggatttgatcaagaattctttgctgagcatggtgcctcatgcctataataccaacactttgggaggccagtgtgggaggatctcttgagcccaggagttcaagactagcctgggcaacacagagagaacccatctctaaaataataataataataaaataaaaaattagcagggcatggtggcatgtgcctgtagttccagctacccaggaggctgaggcaagaggatggctggagcctgggatgttgaggctgcaatgaactgtgattaccccactgcactccagcctgggcaaaagagcgagagaccctgtctcaaataataataataataataatcttattttggagaataaagagacctctggatttgaggtgccatttgggtagaaagaaaagacgtttacaccgagaaatagtctgtgttgccctgaaggagcagagggatgcatcgctggaggtgacctacagttgaagaagactcattatgacagaccttgtccttcttccttgtggaaagtgtttcctctgctgctactgctcatgagactcttccccctccctgtcccagggaaccaaagggctttctaccacaccctttcttgccccccgcctcccatgtctgctgtgcctttgtactcagcaattcttgtttgctccattatcttccagccggatacagagtgaatagttaaccacacttaggtcaaataggatctaaatttttgttcctgctccgtgtaaagaggccagtgtttgtgtgttgcaagcagccttggaatagtaactcttctcatttgtttgggatctggccaccaagttccagaatgatacacggatcagtgcagaagttcatcaggctctcggaccttagggctgttggagaaggcttcagcagcagaactgatggtgaaggctcgtgttctccatcctcaactttctttgcttcgatcatacacaagaatacatttggaagggcaaaaaatgaacactgtcgttcattgcagccgtgttttgtgacacagatgcacagtctgctgtgaagaccttctctcaagtggcatttgggagtccatgccagatcatggtgcttcatgagagactgacagctatcaggggttgtggcacttagtgaggactctcctcccccagtgtgtgctgatgacacatacacacctgacaatagcttgagtcttctctgttccttttactctgtagccaacatacacatgatttaaaaccctttctaaatatctatcatggttcatccttgtccaaatgcagagtcagagctatttgtacttcattattatttccaaggcgaatagttggctttctttttgcaaaaataattaaagtttttgtatgttgcaaaaaaaaaaaaaaaaaaaaaaaaa

SEQ ID NO: 7829 - DNA, 2569 bp, Homo sapiens; identical to SEQ ID NO: 6102
  misc_feature (1930)..(1953): n is a, c, g, or t

SEQ ID NO: 7830 - DNA, 2828 bp, Homo sapiens
  misc_feature (415)..(421): n is a, c, g, or t
  misc_feature (425)..(432): n is a, c, g, or t
gtccgcccacgcgtccggcccaggctctatcttttgaggaccaaatctgtacccccgatttggtggtattcctggcttgtgctaatcagagactcaaagaaagattactgaagcgtgcagaacagcagggccgaccagacgacaatgtaaaagctacccaaaggagactaatgaacttcaagcagaatgctgctccattggttaaatacttccaggaaaaggggctcatcatgacatttgatgccgaccgcgatgaggatgaggtgttctatgacatcagcatggcagttgacaacaagttatttccaaacaaagaggctgcagcaggttcaagtgaccttgatccttcgatgatattggacactggagagatcattgatacaggatctgattatgaagatcagggtgatgaccnnnnnnntgtnnnnnnnnaggacactatgggaggtttcatggaagatttgagaaagtgtaaaattattttcataattggtggtcctggctctggcaaaggcacacagtgtgcaaagatggtgaaaaatatggatttacacatctctcaactggcgagctcctgcgtgaggaactggcatcagaatctgaaagaagcaaattgatcagagacattatggaacgtggagacctggtgccctcaggcatcgttttggagctcctgaaggaggccatggtggccagcctcggggacaccaggggcttcctgattgacggctatcctcgggaggtgaagcaaggggaagagttcggacgcaggattggagacccacagttggtgatctgtatggactgctcggcagacaccatgaccaaccgccttctccaaaggagccggagcagcctgcctgtggacgacaccaccaagaccatcgccaagcgcctagaagcctactaccgagcgtccatccccgtgatcgcctactacgagacaaaaacacagctacacaagataaatgcagagggaacaccagaggacgtttttcttcaactctgcacagctattgactctattattttctgaaggcaaaaatgcatgtttgttagaatggaaacagaaaaacattaaaaagttcattccttaacacaatgtttcaagttaaaccttttgtgtcaccgccccccaccaaccaccacctcctaaatcctgacagcactgtttgcttcccagctagacctgtgtgagaggtgtctggaaatcatgcatggtgtatttgggactatatcaacctattctccacacttcagacaactgtctgcactcacggcacgcacactttgtatcatgcaggccacactcagagctagtcagtacatgaacagtggtgcggtgccagtctgtgtccgttgtgatcacaggccttgctagaccctgatcatctggttctcctctcattaagcatccctaacccccagtcacaccttcctcttacatactgttccccaatggaggcccctggcataggggacagccctgggcatcttcctttggtgtctggctgttttgtcaactctcatccactggtggctcagagccataaggtgggttgattacacaatgccttgtacatgatatagaggcatcaagcaagtaaaatttgacagaaattttaaaatatgaagatgtatagctttcccaagatgatggtaaaacccaggttagtcatcagtaaccttctctattattattattttttagaaacttggaatactgtcattatggctaagagaacaaatctgataaattgtgtaacctagtctcttctctacatggtgatgcatttcagcaattataaattaatataaatgaccaaaagtaacttaaaagcatgagatatttgctatttcattcattgggcacatatcaaattataattttgattttaaatggtcacccatgtatttgttgccaagcaagtaaaaaaataccctaacaaacctgatgtgggtgggaggggcatgtcagtaagtggtgtgttcaatgtgtttgtttcatatgggccctttccaggagtttgcaaaccttgtcatacccatatgcaaaactgtgtttccttgcattaaaccagtgaagtttgggttctcttttgtgctatcaatcagttgtaaaatcagagcttcttatatattctactggaataactgcatcttccactcagtcactacaaaaaagcatagtttcagtttgcatgaatttttttttttttcttcaatggttgtgcagataaggatccatttctgggatagaattgtattttttaagtcatttttttttcttgaaatggatatgtacaaataaaattaaatggaagacaggataaaaaaaaaaaaaaaaaaaaaaaaaaaaaaaaaacagaaaaacaaaacaacaaaaaaaccaacaaaaacacaagaacaaacgaggggagacccaaaagaaaaaacacaccacaaggcgaccagacacaaaataaacaaagaaaaccaacaggcagcaagacgccacaacaacaggcgagcccacatagaaaaggaacaccaagaaacaaaaaaccaaaacgaacaagcaaggacgcacgataaatacagcgacaggtagagaagaagaaaaagaggacaaaccagaagcgcgacagagaacaaacaagagactccacaataggaagggagcaaaaaaaaagacaggaaaaaaaccactccagaaagaataaagaaacgacacacaagcaagagaaataaacaagaaggagagacaaaaacggaaaaagacaaagaaagaaacacgcgcgacagcgataatcagatgggcaaaggagaagaaccagaaactcaacaag

SEQ ID NO: 7831 - DNA, 1664 bp, Homo sapiens
acatgctcctggctacaaaacagatatgcaaagagttcaccgacctgctggctcaggaccgatctcccctggggaactcacggcccaaccccatcctggagcccggcatccagagctgcttgacccacttcaacctcatctcccacggcttcggcagccccgcggttgtgtgccgggttcacggccctgcagaactatctcaccgaggccctcaaggcatggacaaaatgtacctcagcaacaaccccaacagccacacggacaacaacgccaaaagcagtgacaaagaggagaagcacagaaagtgaggctctcctcccgccgccgctgcccttgggtccccccgagtctccgggactgccctctcgactgtcagtggggcagcctctccgactctgcacccgcctcgacctccccacccgctcccacacccctgtgccctcatgtggagcctaagagaacagaacaggccgtgaagccagcagagaaaagttctgccaagtttgtgaacccttttttttttaaacaaaacaacaaatcaacaacagcaacaacaacaacaaaaattaaaaacttttttctaaaaaaaaagtgaaaataaaaaaaattatatgcgcttcatgggactgagtcaccaccttcccttacatacttcagttcagattgtagccatacttaaaaaaaaaaaaaaaagccaaaagatgatgacaacatttttatcagtattgtgaataaacttgaacacaaatacacgaagttccatgtcatgtcttcagttgtagaagtttttcctctttaaggtaaagcgaccaacttgaactttctctggcaacacgattcgcagttatataagggaatcagtgttcacgtctctgtatatatttatttatgtgtaatttaatgggaattgtaaatatggtgagtctgttttaagccttttttttttttatttatctgatcttgttaacctcttgtataggggggttctggaatcttccctatatagttcttcatgtggtctcagtggatcctgatttagcaaattccaggtgtatgggcgggattttttctcggggatttcagtgaattttagccctgtttggtacgcattgtctaacaaggtgcacaaaccagtttggtaccaaattttttacaacaactgctaacacatcacaacatctataatctataatcaggttctcataccacttcaagcttcttaatggacaccgaccagacacacaccgtgatatgggacccctgcaaagaattttggacacctcgagtgcttcgataacccctttctatgttctggtaaggggagaaacacaaaacgttattttaataaccagtgcctccctttaaaaagcatccattttgacgcaataagtaatatttgtttaaacccaggggttagggacatacgcctcatatcctgtctaccaccatttcctggcaacgaccttcacttgggccccggattcgtggtttcacgggccactattagaacctacctagcttgtaatgactgtggcaaaaccaagccgacagtttcaatctgcggcccgatatattttgtgcaacaacagcaaatagttgcgcacttataacacgcagcacgaaatctatgacacatgtacggtcccaccgcaggtacagcgcta

SEQ ID NO: 7832 - DNA, 705 bp, Homo sapiens
gggccacatctgccagagcctggagtctgcgaaggccgggacccggttccccggcccacagtgggggtgtgcaaacccgagagaactgggttgcaaattcgtgaagaatcagcatcatgtttggcagctgagtattggagccaggagcctgccatgagccgatgcagcctcagtgttcctttgccttgggggtttctgagtggtggggttgtaagcagatcctgccaggcacccagaaggaaacctcatcaggactccctcagaaagcaggccctgaagaatcctgtgaccttcatctaaagtaggtcatgagacccctgagcttaaaacggagtgatcggctttggagaagtaaggagacatgacgtgcctgccctggggtggggactaaacttcgtgccactccacgtgaaagggggagaaatccctggaaggcacgcaggctggacatcatcatatattctctacagatggagacaccaaggcccacgccttctgtgctgttggaatttcaggaaggatgggggtggggcacggcctcagccctgggcatgttctgcagattgcactgctcttatctgccagggggtggtgagagggtggctgagctggacagatggcgggcagggacgggctctgcggtctggcagctgacattgatacaagcaaataaagagtctttgctggggaaaaaaaaaaaaaaaa

SEQ ID NO: 7833 - DNA, 1855 bp, Homo sapiens
agcggggtctcgggctcctgccccgtcctgctcacgagttcagtgttcctgggcggccgccttttccagttccaggtgtgcagaagtgtcctctccccacgcgcggcgggctgcacttggtcgctggctccgagatcgcgcggggccgccggaagcccaagacggtaccgggggccgcagccgcagccggcgccgccctccgccctccccaacagcaggccgagtcccgtagcatccggtagggaaatggtcgtgctttcggtccccgccgaagtcaccgtgatcctgttagatatcgaaggacattttatttccttacatcgaagaaaatgttaaagagtatctgcagacacattgggaagaagaggagtgccagcaggatgtcagtcttttgaggaaacaggttctttgcagatgtagttccagcagtcaggaagtggagagaggccggaatgaaggtgtacatctattcctcagggagtgtggaggcacagaaactgttattcgggcattctacggagggagatattcttgagcttgttgatggtcactttgataccaagattggacacaaagtagagagtgaaagttaccgaaagattgcagacagcattgggtgctcaaccaacaacattttgtttctgacagatgttactcgagaggccagtgctgctgaggaagcagatgtgcacgtagctgtggtggtgagaccaggcaacgcaggattaacagatgatgagaagacttactacagcctcatcacatccttcagtgaactatacctgccttcctcaacctagagaagggttgttaaggcagaccgccctgttccccagagttgtccctgtagtgtctaggtttattctaatggtaaaagtaacttacttaaaaaacatatgtacacatatgtatgcaagtatgtatatatgtgtatgctcagattaacttccataggtacataagtgaaagaagtctcagttcagtgaacacaaaacttatttaaagatgctttatatgtagaaattgtttcaaatcatactctaacccttagtgagggcaaagtgtagttggtagaagaaattgctaaatacctatctaatgtgctatgtttatcaaatcgtgtactaaaatggaaagctagttttgagaaattattcagaagccttgttattttaaaaatgaaatatttcaaagactgaatattttcaaagaaaatgaataattcattgcccttgtgatttagaagattataacagctgtatttcatatttgcctccttatatatatcaaagaccaaggtatttccttctgcttcaaaagaacaaaattgggaaagaaaactcacttgagtcttgatcaaacaagtgtcttttacttaagaagaaacttggtaatcattgtggcacccacagcaagcagttgccttaccagtgaaaaaggtgcactgaggtaacatctaaaacagagatgtggttcttaatgtttaacagaacagttctaatcctgccacgtgttatcattatagattttatagttgcctttctaactacttagcacagtttgagaatacgttaattgctatttactatttaaaaagttttactgaaatcagtccataacattaagatgagccctaatatgtaagattttcctctggaatggatgtgagaaatgtaaattttataacagcagtatttatcctggtttaattctaatacgatgtcatgttaatttcatgttgtgattaataaaagcattttttcttcaaaaaaaaaaaaaaaaaaacaaaaactctatccacatgccgccatagcaaaagagaaactgaaaaacaagaatatttagctcttatcgt

SEQ ID NO: 7834 - DNA, 1292 bp, Homo sapiens
  misc_feature (1115)..(1254): n is a, c, g, or t
ggcacccaccgcagcccagcgcgcgttcgtgctccgcagggcgcgcctctctccgccaatgccaggcgcgcgggggagccattaggaggcgaggagagaggagggcgcagctcccgcccagcccagccctgcccagccctgcccggaggcagacgcgccggaaccgggacgcgataaatatgcagagcggaggcttcgcgcagcagagcccgcgcgccgcccgctccgggtgctgaatccaggcgtggggacacgagccaggcgccgccgccggagccagcggagccggggccagagccggagcgcgtccgcgtccacgcagccgccggccggccagcacccagggccctgcatgccaggtcgttggaggtggcagcgagacatgcacccggcccggaagctcctcagcctcctcttcctcatcctgatgggcactgaactcactcaagtgctgcccaccaaccctgaggagagctggcaggtgtacagctctgcccaggacagcgagggcaggtgtatctgcacagtggtcgccccacagcagaccatgtgttcacgggatgcccgcacaaaacagctgaggcagctactggagaaggtgcagaacatgtctcaatccatagaggtcttggacaggcggacccagagagacttgcagtacgtggagaagatggagaaccaaatgaaaggactggagtccaagttcaaacaggtggaggagagtcataagcaacacctggccaggcagtttaagggctaacttaaaagagttttttcaatgctgcagtgactgaagaagcagtccactcccatgtaaccatgaaagagagccagagagctttttgcaccatgcatttttactattattttccaatacttagcaccatttcactaaggaaccttgaatacaaccaggatcctcctttgcatgcgactgtagctgcatttcatgaatagtttgaacccttgtcaatgcattttttgaaaaagaaagaaaaaaaaaacttcgtgtatgtgactcaaagcatgtaaccttaagatgttgcattctaaactgacaataaagacctttccccaataaaaaaaaaaaaaaaaaaaaagcacgaaaaaaaaannnnnnnnnnnnnnnnnnnnnnnnnnnnnnnnnnnnnnnnnnnnnnnnnnnnnnnnnnnnnnnnnnnnnnnnnnnnnnnnnnnnnnnnnnnnnnnnnnnnnnnnnnnnnnnnnnnnnnnnnnnnnnnnnnnnnnnnnnnnaaattgtaagcgtttattttgttttcgcgtttttttgt

SEQ ID NO: 7835 - DNA, 4369 bp, Homo sapiens
  misc_feature (1923)..(1940): n is a, c, g, or t
  misc_feature (3882)..(3887): n is a, c, g, or t
ggaggcaggaactgtgagcgcatttgttggggtctgggaggggaagaggacactgggcggccctggggctctagcaggtgacctcctcaagcccagtgcaccagctctggcccaaactgtgccccaggcagcagctcctcctcctcttctgatgaggcaggtgaccccaatgaggcacccagccccgacaccctgctcggtgccctggcccgcagacagttgaacctgggccagctccttgaggacacagagtcttacctacaggccttcctggccggggctgcaggcccactcaatggggaccacccaggtcctgggcagtcatcctccccagaccaggcgcccccacagctgtctaagtccaaaggcctccccaagtcagcttggggtgggggtaccccagaggcccacaggccaggcttcggtgctacctcagagggccaggggcccctccccttccttagcatgttcatgggtgctggggatgccccactgggctctcggcctggccacccccattcctcatctcaggtgaaaagcaagctccaaattggccccccttctcctggggaagctcagggaccccttctgccctctccagctaggggtctcaagtttctaaagctgcctccaacctcggagaagagccccagcccaggaggcccgcagctcagtccccagctcccccggaactcgcgaatcccctgtcggaacagtggctcagacggcagcccctccccactgttggcccgaaggggtctgggtggaggagagctgtccccagagggggcgcaaggcctgcccaccagcccttcaccctgctacacaaccccagactccacacagctcagacccccgcagtcagccttgtccaccacgctgtccccaggcccagtggtgtctccctgctatgagaacattctggacctttctcggagcacctttagggggccttccccagagccacctccatccccactgcaggtgcccacctacccacagctaactctggaggtaccacaggcccctgaggtcctcagaagccctggagtaccccccagtccttgcctcccagaatcgtacccctatgggagcccccaagagaagagtttggacaaggcaggctcggagtctccccatcccggccgcaggaccccaggcaactcatccaagaagcccagccaggggtcaggacggcgacctggggatcctggcagcacacctctgcgggacagactggcggccctggggaagctgaagacaggccccgagggggccctgggctcagagaagaatggggtgccagccaggcctggcaccgaaaagacccggggacctgggaagtcaggggagagtgctggagacatggtgccctccatccacaggccactggagcagctagaagccaagggggggatacggggggcagtggccttgggcacaaacagcctgaagcagcaggaacctggacttatgggggatcccggggcccgagtctactcctctcactccatgggggcccgggtggacctggagcctgtctcaccaaggagctgcctcaccaaagtggagctggccaagagccggctggcaggggccctgtgcccccaggtaccccgtacccctgccaaagtgccaacctcagccccaagcctgggcaagcccaataagagccctcacagcagccccaccaagctcccttccaagtcaccaaccaaggtggtgcctcgacctggggctccgctagtcaccaaggagtcccccaagcctgacaaagggaagggccctccctgggcagactgtggtagtaccacggcccagtccacacccctagtacctggccccactgacccaagtcagggccctgaggggctggccccacactcagccatcgaggagaaggtgatgaagggcattgaggannnnnnnnnnnnnnnnnnccagggccaggagcgagcccctggcgccgaggtcaagcaccgcaacaccagcagcatcgccagctggttcggccttaagaagagcaagctgccagcgctgaaccgccgcacagaggccaccaagaacaaggagggggctggcgggggctccccgctccggagggaagtcaagatggaagcccggaagctggaggccgagagcctcaacatctccaagctgatggccaaggcggaagacctgcgtcgggcactggaagaggagaaggcctacctaagcagccgggcccggccacggcctggtggcccagccccagggcccaacacggggctggggcaggtgcagggccagctggctggcatgtaccaaggtgcagacaccttcatgcagcagctgctaaacagggtggatggcaaggagctgccatccaagagctggcgggagcccaagcctgagtacggggatttccagccggtgtcttctgaccccaagagcccctggccagcctgtgggccccggaatggcctggtgggccctcttcagggctgcggaaaacctcctggaaagccgagcagcgagccagggaggcgggaagagacgccctcggaggacagcctggccgagccagtgcccacctcacacttcacagcctgtggctccttgactcgaaccttggacagtggcattgggaccttcccacccccagaccatggtagcagtgggacccccagcaagaatcttcctaagaccaagccaccgcggctggatcccccacctggggtacccccagctcggcccccaccccttaccaaagtcccccgccgcgcccacacactggagcgggaggtgccaggcatagaggagctgctggtgagtgggcggcaccccagcatgccagccttccctgcactgctacccgctgctccgggccaccggggccatgagacctgtcctgatgatccctgtgaagacccaggccccacccctcctgtccagctggccaagaactggaccttccccaatactagggcagccggcagctcctcggaccctctcatgtgcccaccccgacaactggaggggctgcccaggacccccatggtgagaattgcagcagaggaaagggaaaggactcgggagcaggagggagtgatgtggggagaccagtttctccagtaaggtacggcctgtgtgtcgcacagtctcagtgctgcaccctctgggaggaggacccctgggatgccctgtgagcggccctccccactgccctccttgcacttctctcgtggggaaaggtttctgtccctccccagaaccttgtaggactgttctcagttgtacctccagcctgtttcctctgaagtataccccaccttgggccccctctggagcagccccccatcaggtgcacagacgcccctcagagctcagtgcctctgaggctgggccgaaaggtggagaggagcttcctcccgagctgcccctcctttcccaggccctgcccgtggaccggaagcgaagccaggagcccagccgcccgtcccctacgccccagggcccacctttcgggggtagccgcacccccagcacttcggacatggccgaggaaggcagagtggccagcgggggccccccagggctggagacctcggagtctctcagtgactcactctacgactcgctgtcctcttgtgggagtcagggctgaggggctgcgccacgccacggccccgctggagctggggaccacagactggaccggctctcttcatgcccagcccccggagacggggacccctccctgaagggaccaaggaggcaggtggataagaaggtgaaaagggggtccctggcacaccccaccacccactgcttcggcggatgagatgaccgtgctcagctcagggagagaccccgcccttggtcccttctctcacccagagnnnnnntcttcctggaagggactgggggttaaaggccactgtgtcgcagccctccagtccctacttcaggctgagccatcttgtggtgctgggcttcctgcccaccagccgtgccatctctgcccaacccggctgctcctctgccccgaagccctcgcgaggccctcctggaggcccccgtgctggtggagtttgggggccagggggacaagttgccttctctctctgccctggtcctccctgctgtctggatggtgctgccctcctctgccccatgcctttggggtctgttcgtccgtcttttttgttgttgtttttatatattgaagcgcctggcccagcccccagcccccagccccgcactgcggttaatttatgtgttgtttaaaatgcggctgctctgcttcctgcctctgcttctgccgtatccctaataaaatgtggaggccccctccctgaaaaaaaaaaaaaaaaaaaaaaaaaaaaaa

SEQ ID NO: 7836 - DNA, 674 bp, Homo sapiens
gggcggaggccctggctgtgcctccgcgtgcttccgccgcaggatgccggcgtccgccctactcgccgagttccctgtacgtgctgtgtccgatgacctgcagcgtggaagacaagaggtttgagcatggcagaaggaaacaccctgatatcagtggattatgaaatttttgggaaggtgcaaggggtgtttttccgtaagcatactcaggctgagggtaaaaagctgggattggtaggctgggtccagaacactgaccggggcacagtgcaaggacaattgcaaggtcccatctccaaggtgcgtcatatgcaggaatggcttgaaacaagaggaagtcctaaatcacacatcgacaaagcaaacttcaacaatgaaaaagtcatcttgaagttggattactcagacttccaaattgtaaaataatggcctgaatttaagttttctaagataaactcagtggtttggtttttattattaatagagatagaactattgtgtgttaatattagcattagtcaataagttattttaatgtcagatttttgaatgttattatatattacctgtatgatggaaggattaccactgtacacaaatctaatcaataaaaacgttagaaccttctgcttagagtacatataaaaaaaaaggagaagcaaaagaaagggcgc

SEQ ID NO: 7837 - DNA, 3382 bp, Homo sapiens
aactttgactcaacttctcctgctgaaaagaagctcgctccagatgtctgcatgggtcctcggcactcttggctgaggactcaaaggttttaatcaggatcgtctaaaaatgtacctcggtgaggaggcacagattttgcctcctgttgaccagcctggtttcataccgaaaagacattgaaggactgcagaaatgtatgggtgcaccgggccgagggaagggtggctgagtgagaggcgtataaaatggggctgtgtgcatgcaggcccatgtttcagcctcagcccacgccaggtgaaaggatcagcaatgctctgttgccatcgtgctgggacgacaccagctctattgccaccgatgagtagctgaggtcagtgtgcacagagtttgaaattaagttaatagactttacagcagctggtctgacactacgcgcagtgctcggttgtttacaatcagtggggaaaagggcagaaccagtgcccggccccacactgcctctgtggcctggactttgaaaggaacccactgaacactaattatgagccctgtctttcccccagaatgcctccctgggtttcacaaacagccttgaggttggccctcctcaaggtcagccttcagatttgggagcaaacttcagagaaggcagaggaagatacattgccttgctgtgggctgcctcttctttcctcttggtgtgcgaagtatttcagaaggccattgatgaattccccctctttagctgtgtatttgtgcacgtgtgtgtgtacgtgcgtgtgtgtgtgtgttcctgtgtaagtaacagaccagactccttttctcttctgtcccgtcaccaggctcttgcttcactgcagatacagttcactctgaaagctggttgaaggagagcagcaaaaatgtatcaggggttttgcttctgtgtttcgccaaagctcataagggctgtgacccacccatatggccccagttttttctgtctcttctgttccaaagccaggagagctgacttccaggtgaagggatgggaaaagtggactctcattgtagtgactcccaacctacctaataatttgttaacttaggaatatgctatcattgttgacttgttcttccttaggagaaggacgattttcacccaccctttctgttctatggtggactcttaacaggtgctatgtgaccaggaatctagccgggagtagcagaggccctgtcttctgaagtctcaggcttagaagttaccaaagtgggctcagaaactgtcatctcctggttccaagttcgggctctggcagcccagccgctatcttagctgtctttcccagcggtgctaagagtggtctcagtgagaaggtagatgccaactggagggccagacctgtgtcctgcccatgtcctccttggtggacgtttctgtttactcagagctgctagagaccatcctgcccatccgagttctgagattgggactgtgatgttgggacctgaggactggatggtagaatactggggtcccccagctcttagcaggatgcaggctattgcttccacacccctggccgtgagaacgtggtatgtaggagagttggctgtagctttaggatttctggaagccaatttggcatggcctatttgatctctggcttgtgctcctgctacactgacagactgattgcgtggctctttcagaagacccaggaagggcagctccagccagaggaccttcctggctatgcaggtgcacagctcttaggcatcaagcaaagggtcagccagtcagtagtagtgggaggaagcccttcctcctcttatgcaagcagctcgcagccagcccagaatctcttatgcagcccaaagggcttcttgaggtagagagccctccccagtgtcttcccaggataagtagaaatatgatcacagagcaacggagcaaaggctttcgggagtgtgaggctgcatctgctggagcaaagggaaaccgtgggcttttccggccagatactcttgagctctgtgaccctgctcctgtcaccccaatttctccaagccagaggtagctttctcagagccccttggtggttctgtcctccaaatgctgctgttgggagcgggcttccagctctcagtgggcagtgcacctcctcctaaatgcaggcacttgctaggaagagtgtgagctggcgtcttctgttcaccctgcctagcagttgtcaccattcacaagtggcattatttatgttgtgctgctgtccagctgctaagatcccttcatctgcacaagccctggctagatatgtgtgaatgtgtggcatcatttcacttcagccgcccaattccatctctcctctgcagccagattcactggctgatgctcactgctcactgtctatccccacgaaatttagttttatcagtagtcttaaagtgttgatctcaaacaagtacattagaaaaatcatgtttcttctctctcatcttacttttctcttctcagatttctcccttcctagaacattctctctgtttagcactaatgttcacctcgtattttttggaagtgcaaaaatctcaatttgtgtctgtttacagctctctctcctcactgctcacagcaaggggttctgtatcagtggatttcattttgtagctgctgagatgttaaggcaagcctcagcatctgcccctgctgggtgcacaatgctgcttcctcgaagagaagacacagagtccaagtggcaggacttgaggttggcttccactctgccttagaagttaattttccaaagtacattacaaatctctgaggccattaggggaaaaggaaggggtgtggtttgtctttgaaattacggttaatacttttagacagtaagtccggctggttgcagggctatttgccccgacagcatcagcctgtaacatttcttctctttcctttgtgccactgagtcgttccctggccagaggacataaatggtgctggtaggaggttatcagagtaaggaaggtagcagatataggtgcagggtgcctgtcattcactgtgttatttggtttaaatcaaagtgattctgggggaagctatgctctttcagtggataataaaattggtaactctattgtaaaacatgtcaatggtgtgtgaagaaaaatcaaccaatctgtaggtgttgataactagacagtactgtgtatgttacgtgcctgtgtggatgtgcacttccagcatggtatgtgtagcgatgtggatcatgccagagttcgtagatcctgttttggggtttgcacatggatcgtatgttaagctttttcttttcaataaatgaattttatttttatttttgaaaaaaaaaaaaaaaaaaaaaaaaaaaaaaa

SEQ ID NO: 7838 - DNA, 2944 bp, Homo sapiens
  misc_feature (2843)..(2843): n is a, c, g, or t
  misc_feature (2879)..(2879): n is a, c, g, or t
  misc_feature (2936)..(2936): n is a, c, g, or t
aagagcagtaacacaaacagggctgaaacacgccctcctcccgtccccacacccccgcgacttgccatgttgcgggtgatgtgaaggagagaagtgctgtggcccttcagggagcacagacctaggggctccctgagccagggctgtgacaccctctttggggctctgcggtttctggtatcttcaaacttccgggcaccactgcattccccttgtccagacacaggtgcccacagcagaagccgcttgtggttcatcagatccagctgcagacttgcatagaaccggcgcctttgccggcgcctggagctgcctgcccagctgcagcagctggtgtgtccggctctgcgcagtggccagaccctgcgttcgctcgcctgcacacccctcgctgttccgtgcctggctcaccctcggcaggcgtggaatcctggctggtagcatgagctgagcacagcctgccaggccacgtcagtggaacaagtctggcgggcctgatcaaaactcaggcaaaggcaccactggtcacagagctttctagctggaaaagcaacacctgaaggatcccgtgacacaatcaacctgctaggagatccctgccaccctgagaggctgcaggaagctgcctccatccaggcctcttcacagaaggagaattgcagagaccgtaggatttttctactcacaggaacagatggtgtccggtcaggaaggtaaaatgcttcaagaaaagtgcaatagggattataatactgatgatctgagactctgataatgactctgagatgattcccaattctatgatgaatcatctcagaatgactccgagatgatgattcctgattctacgatgattgaggcagagctcactggttggtgaatctagttggtagagctgaggcaccgcaataccatcatttctttctgaggaaatctaaagatgaaagaattcatcactaaaactgtactacgagaaatgctaaaggaagttgttcaaactgatggaaaattataccagatggacacttgaatttgcccaaaggaatgaagagcaccagaaatggcaaatgtgtggtcttactgtatcttcatgtcagtgtcatatcaaggacaagacagcagaaatggtccactccagttgcagatagtaaagaccctgtagctccagcatcagctcacctttctggttttgaatttcatgcttattaccatcctgtcatcacctactgtttccatggtagacgggactaagagatgggctttgtgccttgggcaaagggcagcttactcctggaagaggactgactcaaggaccccagaaccccaagaaacagggaatcttccacattcatgaagttcgagataagttgcgggagatagtaggagcatccacaaactggagagaccatgtgaaggcaatggaagaaaggaaattacttcatagtttcttggctaaatcacaggatggactgcctcctaggagaatgaaggacagttatattgaagttctcttgcctttgggcagtgagcctgaattacgagagaaatatttgactgttcaaaacaccgtaagatttggcaggattcttgaggatcttgacagcttgggagttcttatttgttacatgcacaacaaaatccactccgccaagatgtctcctttatcgatagttacagccctggtggataagattgatatgtgtaagaagagcttgagcccagaacaggacattaagttcagtggccatgttagctgggtcgggaagacatccatggaagtgaagatgcaaatgttccagtcacatggtgatgaattttgtcctgttttggatgcaacatttgtaatggtggctcgtgattctgaaaataaagggccggcatttgtaaatccactcatccctgaaagcccagaggaagaggagctctttagacaaggggaattgaacaaggggagaagaattgccttcagctccacgtcgttactgaaaatggcccccagcgctgaggagaggaccaccatacatgagatgtttctcagcacactggatccaaagactataagttttcggagtcgagttttaccctctaatgcagtgtggatggagaattcaaaactgaagagtttggaaatttgccaccctcaggagcggaacattttcaatcggatctttggtggtttccttatgaggaaggcatatgaacttgcgtgggctactgcttgtagctttggtggttctcgaccgtttgtggtagcagtagatgacatcatgtttcagaaacctgttgaggttggctcattgctctttctttcttcacaggtatgctttactcagaataattatattcaagtcagagtacacagtgaagtggcctccctgcaggagaagcagcatacaaccaccaatgtctttcatttcacgttcatgtcggaaaaagaagtgccattggttttcccaaaaacatatggagagtccatgttgtacttagatgggcagcggcatttcaactccatgagtggcccagcgaccttgagaaaggactaccttgtggagccctaagaacaccacatttgttgaaaactagcactctacccacagtgacgtggtatctgatgaagacctgatcgagtgtattgattttagtattgcttcgtgtcctccacacaggaggaggatgtattcagcctttaggatgatcagaaaagcagaaagagagagtggccggatggggctgaggggagaaagaattattaaacaataaatactttcaagacaaatttaaaaaagaaaaaaaaaaaaaaaaaaaaaaaaaaaaaaaaaaaaaaaaaaaaaaaaaaaaaaaanaagggagaaaaaaaaaaaacttggggggggcccggncccaaattggccttttggggggcgttttacaatcactggccgcggttttcaaccgcnggactggg

SEQ ID NO: 7839 - DNA, 2476 bp, Homo sapiens
ggcacgagggtaaggccgttttcttttcccattcgctcatctgccaggaaaagggacttgccgttggcgcttcggcctcttgttcattgagaaaaaagaggaaatactccgcgtgcgcttgtagaaggggagtcgtctccagctccgaaccccggagtgttcatcagcggggaatctggctccgaattctctttttttctcccgccgattgctcggaagttggtctaaagcagaggttggaaagaaaggaaaaaagtttgcatcgagactggatttatttgcacatcgcagaaagaagagaatccaagggagaggggttggtgcaaagccgcgatcacggagttcagatgtgttctaagcctgctggagtgaccacacttccaagacctgatggaggccagagctcagagtggcaacgggtcgcagcccttgctgcagacgccccgtgacggtggcagacagcgtggggagcccgaccccagagacgccctcacccagcaggtacatgtcttgtctctggatcagatcagagccatccgaaacaccaatgagtacacagaggggcctactgtcgtcccaagacctgggctcaagcctgctcctcgcccctccactcagcacaaacacgagagactccacggtctgcctgagcaccgccagcctcctaggctccagcactcgcaggtccattcttctgcacgagcccctctgtccagatccataagcacggtcagctcagggtcgcggagcagtacgaggacaagtaccagcagcagctcctctgaacagagactgctaggatcatccttctcctccgggcctgttgctgatggcataatccgggtgcaacccaaatctgagctcaagccaggtgagcttaagccactgagcaaggaagatttgggcctgcacgcctacaggtgtgaggactgtggcaagtgcaaatgtaaggagtgcacctacccaaggcctctgccatcagactggatctgcgacaagcagtgcctttgctcggcccagaacgtgattgactatgggacttgtgtatgctgtgtgaaaggtctcttctatcactgttctaatgatgatgaggacaactgtgctgacaacccatgttcttgcagccagtctcactgttgtacacgatggtcagccatgggtgtcatgtccctctttttgccttgtttatggtgttaccttccagccaagggttgccttaaattgtgccaggggtgttatgaccgggttaacaggcctggttgccgctgtaaaaactcaaacacagtttgctgcaaagttcccactgtcccccctaggaactttgaaaaaccaacatagcatcattaatcaggaatattacagtaatgaggattttttctttctttttttaatacacatatgcaaccaactaaacagttataatcttggcactgttaatagaaagttgggatagtctttgctgtttgcggtgaaatgctttttgtccatgtgccgttttaactgatatgcttgttagaactcagctaatggagctcaaagtatgagatacagaacttggtgacccatgtattgcataagctaaagcaacacagacactcctaggcaaagtttttgtttgtgaatagtacttgcaaaacttgtaaattagcagatgacttttttccattgttttctccagagagaatgtgctatatttttgtatatacaataatatttgcaactgtgaaaaacaagttgtgccatactacatggcacagacacaaaatattatactaatatgttgtacattcggaagaatgtgaatcaatcagtatgtttttagattgtattttgccttacagaaagcctttattgtaagactctgatttccctttggacttcatgtatattgtacagttacagtaaaattcaacctttattttctaattttttcaacatattgtttagtgtaaagaatatttatttgaagttttattattttataaaaaagaatatttattttaagaggcatcttacaaattttgccccttttatgaggatgtgatagttgctgcaaatgaggggttacagatgcatatgtccaatataaaatagaaaatatattaacgtttgaaattaaaaaaaaaaaaaaaaaaaaaaaaaaaaaaaaaacaaaaaaaaaaaaaaaaaaaaaaaaaaaaaaaaagggggggggggtaaaaaaaagctccccccgagagggagcacccaagaagctggcgagcgacgacacgacactatagttggctggaacaacgaaaggcggcgccccaccaaatgggaggaggcagccataaatcaaaaacccaagaaacccggcgggcggcggctacatacaacaacgatccgttggagcgggcgaaaaaaaccgaggacccgtgggcggaccatctgcgcagcgagaacacctaccaccgggggggggaaacacatcgggggacgcacccaccaggaggct

SEQ ID NO: 7840 - DNA, 1592 bp, Homo sapiens
  misc_feature (1068)..(1075): n is a, c, g, or t
  misc_feature (1082)..(1082): n is a, c, g, or t
ggagttcaagaccagcctggccaacatggagaaaccctgtctctactaaaaatataaaaaattagccgggccatggtggctcacgactgtaatcccagctactcaggaggctgaggcaggagaatcgcttgaaccagggagtcggaggttgcagtgagccaagatcgtgccactgcactccagcctgggtgacaagagcaagactctgtctctaaaaaaaaaaaaagtctccaccctgccaaacatggaacccctttgtggccatgcccccaaaattgtccaacatgtggttgggcagccctgcagcaagccccctgccccctgaaccaggcacagaatcccgaccccctctcctttccgtcttggtcagtgcccagcgcacccgtgatcgacctggctgagtccctggtggcagataactgtgtgaccctggtgtggcgcatgccggatgaggacagcaagattgaccactacgtgctggagtaccggcggaccaacttcgagggcccgccccgcctcaaggaggaccagccctggatggtcatcgagggcatccggcagacagagtacaccctgacaggtctcaagtttgacatgaaatacatgaacttccgtgtgaaggcctgtaacaaggcagttgcaggagagttctctgagccggtgactctggagacaccagcgttcatgttccgcctggatgcgtccacatcccaccagaacctgcgggtggatgatctctccgtggagtgggacgctatgggcgggaaggtgcaggatatcaaggctcgcgagaaagatggcaaggggcggacggcgtctcccatcaactccccagccagaggtactccatctcccaagaggatgccctcaggtcgtgggggacgggaccgcttcaccgctgagtcctacacagttctgggggacacgctgatcgacggcggggagcattactgggaggtgcgctacgagccggacagcaaggcgttcggcgtgggcgtggcctaccgcagcctgggccgcttcgagcaactgggcaagacggccgcctcctggtgcctgcacgtcaannnnnnnnctgcagntcagcttcacggccaagcacgccaacaaggtcaaggtgctggacgcccccgtgcccgactgcctgggtgtgcactgtgacttccaccaaggcctcctgtccttctacaatgcccgcaccaaacaagtgctgcacactttcaagaccaggttcacacagccgctgctgcctgctttcacggtatggtgtggcagcttccaggtgacgacaggcctgcaggttcccagtgctgtgcgctgcctgcaaaagcgaggcagtgctaccagcagctccaacaccagcctcacctaggcccccaggcacccacccagctggggtgtttttgggggagtcgccgccaagcccaggctgctggagccaggcaccctcctctgtcacttgctgcttggagccttaactccagatgggggggtcaccaagagggagtgggcaccctggcgggccctctccccacctcacctcttaataaaggtcagacactggccaggcgaaaaaaaaaaaaaaaaaaaaa

SEQ ID NO: 7841 - DNA, 5383 bp, Homo sapiens
  misc_feature (589)..(607): n is a, c, g, or t
  misc_feature (2038)..(2056): n is a, c, g, or t
  misc_feature (3012)..(3043): n is a, c, g, or t
agaatatgagaagttaaaccagggaccatgccagaaggttctctcactgatcccacaagtacagtctacagaaaactaccttgactccactcctccagaaccccttcaccctgtggcactggctgggcaccttgtttgtcttcattgggaccttaatgtacacagaggtgtggaacaacctagggaccacaaaaagtgagcctcagaaggacagcaagaagaactgaggcctgtctggagtacgtagaccagtgtcgtcgtgagggtgggaccctgtgaaggtctgaccaccgtttcgcttttgttaatgccgagctacccgcagtgctgagccagccgtgcaaaaggaaatcttcaggaggggacttctcacgttgctcagactgacacatgtagactaaatagaaacccctcagccctaaaatagaaaaaagaacagttctggactattgaacagcccattcatttatttctgttttgtttaccgacatattcagtattattcttgttttctgaattctgagtctcctgaacaaaaggcttactatccatggtcttggaaaagattgtcccttctcttgctgttgtnnnnnnnnnnnnnnnnnnncagtcattgtcatcctgtgaccttatcccttttgtctcccatcaccttttccttcttcagcagcacctcacagtcagtcagacgctgcaggcaccactatcaccaggagtggccaagtaaaccgagacaccagtaacagcagggctggacttcctccagcgttttgggaaggaaagagatgttcccctgagctgattcccagtgacagtgcagcaagactagtgggactcctctttcccacattttgcttttttttttttctatgcaaaagtcagatgcttctatccattgctttctgtgattagggcggccctgcagcatatctcacagcagacacagtgttcataacaaagaaaggttgtgccgggcacggtggctcacacctgtaatcccagccctttgggaggctgaggtgggtgtatcacttgaggtcaggagttcaagaccaatctggccaacatggtgaaaccccatctctactaaaaatacgaaaattagctgggtgtgatggcgcatgcctgtaatcccagctacttgggaggctgaggcaggagaatcacttgaacccgggagatgaaggttgcagtgagctgaggtcgtgctactgcactcccgcctgggtgacagagtgagactctatctcaaaaaaaaaaaaaaaaaaaaaaggttgtaatggactggacacccctgaagcccattgcctaggaaaaaaaaagtggtgacggcaggatggcccttctcagcaccgcaagagccatggctgtccctgttggcccagccgggcactcacagggcagaagggtgggtctcaagtgggaggataaggcttcaccaccaggagattcccctctgcccgatgactctgttaagagtcacgacccatcaagggaatgcatagatggagatatatattgtgtgatgtgtaaatcaggtcaaacctcaacgacaattgaaagttgttattgtcctatgaggtatcttagcattctcgatgggtattgaggatggttggatgtgctttattgtgtgtggaaacatgcctgtctttgctaatcatttcagaggtccagttttcctttcactggacaatcttgaataggaggaacgctgttgctgtaatatgcgtagcttgtgtgtgctcttgtgtagtctgtgtgtgatcaaagggcacggaagtggctgcactttcacatcccttttctttacttagctggaaccttacataccagtacatgctcctctgtaagcagctgaactcaccggccacttctctgtttgcctatagacaaagactgtgtgtgtgtgtgtgtgtgtgtatgtatgtgtgtgtgtggtgcacacattgtgttcttaaactgagacgtggctctgcaggtctcctgggctcattccatggtgtggtatgtttattccactgtccagagctattcnnnnnnnnnnnnnnnnnnncagcagtggagataaatgtcctagagtcaccaggtcgcttggagaagtcatttaagctgcctcgggtttttgttacttaaaatgtggatattatttctccacctaaatcactgagtttacagagtaataatgtgttgctctggacattgacagctttctagagccagtaatgggctcttctgaaggatgctgaattagaagtgaacctattcataggatcaaaagccacttgctttgaaatatgtagagttcctcagaattgacggtgctagaaatatccaagtgttaaataaccctttaaaagcaacaaaagctacttttttcttaccacttaatagaagaacctgtccctagaggcgacttcattgctatggatctggagtctctgaactcttaataggatgcagcctcacatacataatgtcacccattttatgttgatgaaaacattacaagttttcatcattgggtatgtgttgatgttcacagacagtacttgggcccattaggttttcgcgtctggtcttagagcatgtgtattcatctcagcgtgaatacctcagccagtcttatgaataggaggctatgtatgggcagggaatagattagattagaacactcgcacaagatgaccacatatagaagcagaaagccccaaattccctgggaactgttttttctctagtagctgaatataaggaaatatgtctaatggacaccagttaatactttttaaaactactctttaaaaaaaaaatacgttccccttggttaactgattttttaatccagggtggacattttttcaacctttattaaaaagacaaataaactattttgtagaagatcagactcctacttaactggaagagaaatgtctattaaatgtctctcctctttctctgggtcaagaccatgtaattttatgcttcagagatgaagatactgtttgtttnnnnnnnnnnnnnnnnnnnnnnnnnnnnnnnnctctatgctagagcaaaaatcaaatagcaaaggacactagccagaaaatacagtgtgtgtgtgtgcacctgtgtgcctgctgaacaacttgacagtgtaacagataaggtaactgaagatggtggatatttgaattgtattagcttaatgtctacatatctttggccaaaactctattgtcatattagaaacatgttatctttttcatgtttattagtaatttatttttgattctttgttttctttttcgtccaactaaaacaactgtaatgtacttgatacatttatatcaagttctaaagtatttagacaaatccaaatactttgtttttagttttttcctcctttccatcctgttaaccacagtgaaacgctgcagtattttgatttggtcagtgctacggaggaagaccatgaaagctgaattggtctgtgccacccagagtaaacctcttctcttcttctggacagatggcgtgatgttttcacaggattctaataaatatcccgcagtcatctcctgagcagctttcctctgtttcacttcggaactccttcccccactttcttcactccagtttcttcacttgcagcgttttctgctaagaaagacttatcatcttgtatctgtttatgcctctcttctttggggcccctggatgtttttgtggatttttacagagtatttatatctgcacagcgtgtattttgttatacattcttacaagcattgatattggggggtacatttataatagtgagaatatctggcagaatgtgtgaatgccatatctgtagatgacgatgaatgtgaagggttaatgtagaaatgtttgtttattctgttacagctcaaaatggaggctgagaatctctaccaccattcccttctctatttgagaatctctaccaccattcccttctctatttgggaaacaatactctcttattttgctatttttaccttcccattaactggcttcactcaacagtgccagatacctatggagaggggaagtaaaacaccttaggtcaggaataataaaccaatgagttagctcagggccggtggacatgttcactggtggaccagttggcattgacctaaacggacagagaaatgcacatggaggagaactacgttgaaatcaagatcctatgtctgttgtattttctctttgcctggagtaaatagcattataagtcattccacccttattagataaccaaagcatattggtctcaatagctttctcctgaaaaatgtgattgaatcttacctgtagcagttcactcttaaggttgaaagaactgtcaatatagataaaatccattccttattattattgattggtgtgacatttgaaaatgtgtctaaacaatatttgtaagtaaaagaaccagtcataagcctcaaatgtgttcagtgtgtaccaagctggaatgggagactggcccctcttggctttaaagtagcatgttgtctttttctagcagcttcttcctagtagacattccagggatgggaggggccagggatcatgtcttactcatttctgtatcgccagcccctggcatagtgtctggcttatgttacgtgaataaatgaatgcttgccaagatctcttcttccctcaagtttctggaaaacctgagggttcgtgatacctgttcccactcctcatcagcgggctggcaagaaagcaaataaggggaaacatttttaacattccaagcaagagaaggaagaacgactatttgggaggaggtacaccagaagattgctcagtgtgcagcctgctacctcacttttggctctgggttgcctggtgggtagaagggaagagatattatgtagttagcaccttacatatttgatgctcaggaagaaagtgcaagaagatccctaatagaacattaaagattcttaaaagtttttgaagtaggctgcttggggtgaccagcccccaccttacatctccatagttggtacagttagcttgtagcaactgaagctgatgcctgggagatcactggcctggtggggcttgatctcagtaatcctacctgagaaaccctccccctgagccctaccctacctaaaatttgggtaaccggtccttaccaaaaattttggtccaatttttaaatccagggggagggcaagttgcccaggggaaccccaaaaaaaaacggggaaaaaaagaaaaagcccaaaaaaaccgggaaactttttcaaaaaaaaaaaaattgggaaaaaatttttctttggggcacatttgggcttaccgggaaaatcctttttgaaaaaaggctaaaaaaccaacccttttggtgaaa

SEQ ID NO: 7842 - DNA, 4996 bp, Homo sapiens
caaagctctaagtatgctgggacagatactacaaatgaactttatgatgagcgaattaacctgatttatagtcctgtactttctctacgtgccatatccattattaaagaaatgagtctaagtaggaagtagagttaacctatagtttcatttcttgaatttcttattctctttcttcagtctttttcagttaacctacacacacacacacacacacacacacacacacacacatacatgtttataagtgggatgggagaacgggtacggtgataattaaaagaggtaaggtttctcttgagatgaaaatgttctaaaattgtgatggcggatgcacacctctgaatatattaaaagccattgaaatgaaaaaagggtggggggaatccaaaagtgtagcagacccaaccttgagatttgcttgtttgggaatgaattttccaataacttgaaagttgtaaaaactcacacttctcagggttaggtgtcagaaagaaaaggaagtaatttattctttaataaagcaattgttaaatactctttagaactaccactgattgcaattttgcagtgtctactcatagtgtctatataggtaccatgaaaaagatgtacttgtgaaactgttctcatgttacttcagaaaaattttgcttctaagtgtgtattctatgtctggttaaatgttcattgaattttatttaatcattaatctcaacagcattaaacagtcaataacataaatgacagtcttctctttgtactcctccctgtacaacatcacagagctccatctgtatacacgaaagtcacatgaaaatagaactcagtgttttgtattacatagtctattcagtacatttagaagtattttgcctccaatattcaaccacagtaaaagactcagtgagaacgcgtggtggcgctgcaggttaagatgacggaaaatacaactgcctacgcagctccaggatccagcaaaccgtttcccaaagcctggaagcaaaagaatagctgagccagagcgaacgtgagtgtgaaacctctttaagacaccgttgggctgcttggttctgacattctggactgcaaaacagttctactaggatcctggggatacatgaagcttctgtgaaccaacttttcaagaaaaagcaatggagattggatggatgcacaatcggagacaaaggcaagtccttgttttctttgttttgctgagcttgtctggggcgggcgccgagttggggtcctattccgtagtggaagaaacggagagaggctcttttgtggcaaatctaggaaaagacctggggttggggttgacagagatgtccacccgcaaggccaggatcatttcccaggggaacaaacagcatttgcagctcaaggctcaaactggggatttgctcataaatgagaagctagatcgagaggagctatgcggtcccactgagccttgcatactacatttccaagtgttaatggaaaaccctttagaaatatttcaggctgaactgagggtgatagatataaatgaccattctcccatgttcactgaaaaggaaatgattctaaaaataccggaaaacagtcctctaggaactgagttccctctgaatcatgctttggacttggacgtaggaagcaataatgttcaaaactataaaatcagcccaagctctcatttccgggttctaatccatgaattcagagatggcaggaaataccctgagctagtgttggataaagagctggatcgggaggaggagcctcaactaagattaaccctgacagcgctggatggtggctctccaccgcgatctggaactgctcaggtccgtattgaagtggtggacatcaatgataacgctcctgagtttgagcagcccatctacaaagtgcagattccagagaacagtcctcttggctccctggttgccaccgtctccgccagggatttagacggcggagccaatggaaaaatatcatacacactctttcagccttcggaggatattagtaaaactttggaggtaaatcctatgacaggggaagttcgactgagaaagcaagtagatttcgaaatggttacgtcttatgaagtgcgcatcaaagccacagatgggggaggtctttcaggaaagtgcactcttctcctgcaggtggtggacgtgaatgacaatcccccacaggtgaccatgtctgcactcaccagccccatcccagagaactcgcctgagatagtagttgctgttttcagcgtttcagatcctgactccggaaacaatgggaagacgatttcctccatccaggaagaccttccctttcttctaaaaccttcagtcaagaacttttacaccttggtaacggagagagcactcgacagagaagcaagagctgaatataatatcaccctcaccgtcacagatatggggactccaaggctgaaaacggagcacaacataacagtgcagatatcagatgtcaatgataacgcccccactttcacccaaacctcctacaccctgttcgtccgcgagaacaacagccccgccctgcacatcggcagcgtcagcgccacagacagagactcaggcaccaacgcccaggtcacctactcgctgctgccgccccaggacccgcacctgcccctcgcctccctggtctccatcaacgcagacaacggccacctgttcgccctcaggtcgctggactacgaggccctgcgggagttcgagttccgcgtgagcgccacagaccgcggctcccccgcgctgagcagagaggcgctggtgcgcgtgctggtgctgacgccaacgacaactcgcccttcgtgctgtacccgctgcagaacggctccgcgccctgcactgagctggtgccccgggcggccgagccgggctacctggtgaccaaggtggtggcggtggacggcgactcgggccagaatgcctggctgtcgtaccagctgctcaaggccacggagcccgggctgttcggtgtgtgggcgcacaatggcgaggtgcgcaccgccaggctgctgagcgagcgcgacgcagccaagcagaggctggtggtgctggtcaaggacaatggcgagcctccgcgctcggccaccgccacgctgcacgtgctcctggtggacggcttctcccagcccttcctgccgctcccagaggcggcccccggccagacccaggccaactcgctcactgtctacctggtggtggcgttggcctcggtgtcgtcgctcttcctcttttcggtgctcctgttcgtggcggtgcggctgtgcaggaggagcagggcggcctcggtgggccgctgctcgatgcctgagggcccctttccagggcgtctggtggacgtaagcggcaccgggaccctgtcccagagctaccaatacgaggtgtgtctgacaggaggctcagaaacaagtgagttcaagttcctgaagccgattatccccaacttctctccttagggcactaggaaagaaatagattaaaattccacccttcacaatagctttggatttaattattgataggaacccatttgataaattccttaacttcttatgattgtcttgttgattaaattgttcatgctcaccaccaccaataaggtatttttctctgattgttagttcaaattatattgttaattccagtttcccttttcctcatatttaccccgaagaggtgttgcatatagaatcccaattaacaaaatatactttatcttcaaagttgatgtcatttaaaatttttccgtctttatattttatttacttcctattcattttttgctccatttttcatgttacttctcagtttcctagaacttcaagtattaaaataacctgttgcatgtattaggcatatttcctatgttacatttcttttgtctattttcctttcaaaattggtatttttgttgggctcaattttcattataatacttttcttaaagtttctttctttcttttcttttctttctttttttttttttcctttttgagacagggtcttactcttgtcacccaggctggagtgcagtggcacaatcttggctcactgcaacctctgcctcctgggctcaacggatccttccacctcagcctcccaagtagcttggactataggtgcatgccaccatgcctggctaatcttttgcagcgatgggattttgccaagttgcccaggctgatcttgaactcctgggctcaagccatcctccctcctcagcctcccaaaattctgggattacaggcataagccaatgtgcccatccaaagttttatttatttatttttttgagatggagtctcgtaaagttacctttaaaaaaaaagttctattttccctgtattggtatctccttaaataaaataaaatattcctattgtaagtgatatgagaaatctttaaccagccttatctaaaaataaaaagagaagccattgtaagacattcagtatgtgtaaatgtgtttgtgtttgtagacaaaaggcaaaggtattatgtaaaaatatttaataatttattctttctattactgaattaaaaaatcagaggtccctgttatatttttaatggctaacaactcaatctcattaagttggaaaaaaaacttatcaaagagacatttacatggtttggcttttatattcatcatagtatacattggcggtatctagccctttctctgtaaaatatccctatgtttaatctgtatttcttgcttattatatgtaaagttgagcttctttctagatattaggcctttgaataaaattctatgtgagtcagaaaaaaaaaaatgttttcactttcaatagtgttaggataggtgttagtttgatctgttctttacctccgcttatttggttcagagaaattagggcctactagatttccactaaaagggacttgaaaataaaggtcagtcccttctttaattctgcaagttactttaaagctaatctaag

SEQ ID NO: 7843 - DNA, 583 bp, Homo sapiens
tactatttccacagggcatcacatggtgaggggactaacgagagacagccacattggcttttattacagacccactcttgtgctaactagccccttctctgaataacccattaatctgagaatggctcaagcacttcctaaaggtctcgcctcttaacacgcctgcattgggcaccaagtatccaacagatgaacttctgggggacacattcaaatcgttgcggggtattaaagcgaagtacaaagaagagagatttgctgtcaagtagtttgcattaaacttggaaataaatatgaattggtaggttacctattaaacaagtgtgttagagtagcctagcagttttcaaagtgtagtctgtggaatcctagagaatagactcctttcatggagtctgtgagatcagaatagtttcataataatactaagtcatcatttgccttcttccctgtgttaacatttgcagtgatatccaaaagcaatgctgattaaaacgttagcataaccctgagcaatagcaccaaactagtagcaggcattgtgttctttattgtcatgcagtttaaatttgcagtaaaaaaa

SEQ ID NO: 7844 - DNA, 2170 bp, Homo sapiens
gggaagagggagcgaaaaccaacgtgttcggtgacagaccccagcgccgactgagcctctaaagcgacttcaggctctgccccaccaacaccaccgcgcgcccgggaacagccgctccgggaagaaacctgaggggactgcggggggcacgagggacagctgagggaagggaggacgcgagagaaacagcgcgagcacgctgagggccgggggttgccaggagaggggcccgcggacccgcagagcggaggaaggtccgggagaaaaggggcgggacggaggagaatccgggatcgcctggctagaaaaagagaagctttaaattagacgatcggagaaggctgagggaattgctatgaaggggcgggagctgaagtgtagaggactcctttagacagcagaaagggaaagccgttgagaagttcccttcaaagctccacgctgggtcctctccaattcagactccaatcccttctccaagagttaaaaggaaagccaaggtttgcgaggctcccctgttcctagtcaataaatacttcttctagtcacgccaccgggaaaacagaagaaaagaactaatttccttcccaatattaggacttagaaaagctctaggtcacgaaagtatgaattttaggcctaggggaatcaaaatagtaggagcattactcttgtttgctttttgcaatatcccagacttaatcgttactgtgagggccatgttctaacaaaatttgtaagtttcaaggacagcgcagtggacttcactggaagatgctatttcaccaaaatctgcaaatgtaaactgaaggacatcgcatgtttaaaatgtgggaacattgtaggttatcatgtgattgttccatgtagttcctgtcttctttcctgcaacaacggacacttctggatgtttcacagccaggcagtttatgatattaacagactagactccacaggtgtaaacgtcctactttggggcaacttgccagagatagaagagagtacagatgaagatgtgttaaatatctcagcagaggagtgtattagataaatggaattatgatatatatgatatacaaacttttttctatttaaaaatatattaatggatcaactttaaaattgttagttgccagtgatcttttttggaaaacaaaaatggggcatttgttgatttatttattttccgtctctaattagttacctcagtttgattgaagccagtggagttgtgcttttcctctacttctacttcctctcccccacctttttctgcccagtgtaggtgtattcttaaattcagacgggaagattctttcacatatcactcagttacctcccaatctgggggagtttttcttacaacttgataccagataccattaattttacattcctgaataaaggcctagtacccacgcatatttcaaccatgcatatatcaagttcaactgagttttaataggggattaaaaaaacaagctgttaggtttccatggcacttgggtctataggttctattggtgataactgctttaacatggagcaagagtttgtgaatcaggaaatagaataaattaaaatttaaaatatatagaggaatcctcttgattgctcagcatgatgttagataaatgagtttgtcagaaaatatcagtatacgctgtttaccaatgttatttatttacattcttctaaagccattatggatattgtattatgagagctaaacctaaataagttatcctgttccctaggaccttctctgtaaatagtgaattttagacgagtagtctgtcctaaatcttaaatagaaaaaaaactaaagcgatttgcttaagccattgtacattataaagagctgttttgttttgctttgctttgctttgttttgtttttttaaagctgcattcagagccacaaaggaataggaaagtagggtagtgttggattctggttttatgtaactctaaaataaatgtatctctttaatatctcagttgtagggattttgtcaataccaaagcagactgagttgtggttttgtaaataaagttttttctaaaaatgaccattcttcctttaattttttgttatgcccacatattgtatgtaaaaatataaataaatagtacttaaagtataaaaaaaaaaaaaaaaaaaaagagtt

SEQ ID NO: 7845 - DNA, 2537 bp, Homo sapiens
  misc_feature (1391)..(1407): n is a, c, g, or t
ctggagcaacaagcagggcctacaagccgaggagggctgtttcacgaggcaggggccattttacctccaggttggccctgctcaggaccaggaggaaacacctccagcccgcgacctcctcccacagggggaaaaggaaagcaggaggaccacagaagctttggcaccgaggatccccgcagtcttcacccgcggagattccggctgaaggagctgtccagcgactacaccgctaagcgcagggagcccaagcctccgcaccggattccggagcacaagctccaccgcgcatgcgcacacgccccagacccaggctcaggaggactgagaattttctgaccgcagtgcaccatgggaagctctgaagtttccataattcctgggctccagaaagaagaaaaggcggccgtggagagacgaagacttcatgtgctgaaagctctgaagaagctaaggattgaggctgatgaggccccagttgttgctgtgctgggctcaggcggaggactgcgggctcacattgcctgccttggggtcctgagtgagatgaaagaacagggcctgttggatgccgtcacgtacctcgcaggggtctctggatccacttgggcaatatcttctctctacaccaatgatggtgacatggaagctctcgaggctgacctgaaacatcgatttacccgacaggagtgggacttggctaagagcctacagaaaaccatccaagcagcgaggtctgagaattactctctgaccgacttctgggcctacatggttatctctaagcaaaccagagaactgccggagtctcatttgtccaatatgaagaagcccgtggaagaagggacactaccctacccaatatttgcagccattgacaatgacctgcaaccttcctggcaggaggcaagagcaccagagacctggttcgagttcacccctcaccacgctggcttctctgcactgggggcctttgtttccataacccacttcggaagcaaattcaagaagggaagactggtcagaactcaccctgagagagacctgactttcctgagaggtttatggggaagtgctcttggtaacactgaagtcattagggaatacatttttgaccagttaaggaatctgaccctgaaaggtttatggagaagggctgttgctaatgctaaaagcattggacaccttatttttgcccgattactgaggctgcaagaaagttcacaaggggaacatcctcccccagaagatgaaggcggtgagcctgaacacacctggctgactgagatgctcgagaattggaccaggacctccctggaaaagcaggagcagccccatgaggaccccgaaaggaaaggctcactcagtaacttgatggattttgtgaagannnnnnnnnnnnnnnnnttcaaagtgggaatgggggaccactcacaacttcctgtacaaacacggtggcatccgggacaagataatgagcagccggaagcacctccacctggtggatgctggtttagccatcaaattccctcccaatcgtgtcctgcccccgacgcgggaggttcacctcatcctctccttcgacttcagtgccggagatcctttcgagaccatccgggctaccactgactactgccgccgccacaagatcccctttccccaagtagaagaggctgagctggatttgtggtccaaggcccccgccagctgctacatcctgaaaggagaaactggaccagtggtgatgcattttcccctgttcaacatagatgcctgtggaggtgatattgaggcatggagtgacacatacgacacattcaagcttgctgacacctacactctagatgtggtggtgctactcttggcattagccaagaagaatgtcagggaaaacaagaagaagatccttagagagttgatgaacgtggccgggctctactacccgaaggatagtgcccgaagttgctgcttggcatagatgagcctcagcttccagggcactgtgggcctgttggtctactagggccctgaagtccacctggccttcctgttcttcactcccttcagccacacgcttcatggccttgagttcaccttggctgtcctaacagggccaatcaccagtgaccagctagactgtgattttgatagcgtcattcagaagaaggcgtccaaggagctgaaggtggtgaaatttgtcctgcaggtccctcgggagatcctggagctggagcatgagtgtctgacaatcagaagcatcatgtccaatgtccagatggccagaatgaatgtgatagttcagaccaatgccttccactgctcctttatgactgcacttctagccagtagctctgcacaagttagctctgtagaagtaagaacttgggcttaaatcatgggctatctctccacagccaagtggagctctgagaatacaacaagtgctcaataaatgcttgctgattgactgatgaaaaaaaaaaaaaaaaaaaaaaaaaaaaaaaaaaaaaaaaaaaaaaaaaaaaaaaaaaaaaaaa

SEQ ID NO: 7846 - DNA, 3956 bp, Homo sapiens
ctcggcacgaggcccaggctaagcgccgcgcgcaaagccgtgcggagattggaggccgcgcgggtccctggtctgggccatgtctggctgtgatgctcgggagggagactgttgttcccggagatgcggcgcgcagcgatgaaatctacattgctccttcaggagtgcaaaaggaacgaattcagcctgaagacatgtttgtttgtgatataaatgaaaaggacataagtggaccttcgccatcgaagaagctaaaaaaaagccagtgtactcctcttttcatgaatgcttacacaatgagaggagcaggtgcagtgattcatacccactctaaagctgctgtgatggccacccttctctttccaggacgggagtttaaaattacacatcaagagatgataaaaggaataaagaaatgtacttccggagggtattatagatatgatgatatgttagtggtacccattattgagaatacacctgaggagaaagacctcaaagatagaatggctcatgcaatgaatgaatacccagactcctgtgcagtactggtcagacgtcatggagtatatgtgtggggggaaacatgggagaaggccaaaaccatgtgtgagtgttatgactatttatttgatattgccgtatcaatgaagaaagtaggacttgatccttcacagctcccagttggagaaaatggaattgtctaagccaaaagaaagtctaattatatacagagataaagctaaacgtaattattatttaaatgaaagctatttttttaaatgaattgaaatttttcatgatgctactaatttgccactaaatactgcaaatggtcaccctgaatctcttctgacattggatgttatttgcttatattcttataattttaaatgagggcacagtgaaatgaaaattttatactctatgtttctgcttatttttaaatccttaacagcaaaatatttgcctttaatttcttttttatatatactctcagagaattcctcttaatttttaaagatgctggtgataataaaattcattagaaaataaaaaaaaaaaaaaatgagcattctcttgttttctctctctctcgagaaggatctgaatgtcttctctctccctgttacctcactcgtggcttgtagctccacagacccagctgccctctgtaaatcagaggtggggaaaacacccaccctagaagctctattgcccgaagattgtaaccctgaggagcctgaaaatgaagacttccacccttcctggtccccctcaagcctccccttccgcacggacaatgaagagggctgtgggatggtgaagacctcccagcagaatgaggatcggccccctgaagattcttccttagaactccctctggcagtgtgacaggcgctagaggtcctgcctcttacccattctctatttattcccttattttatctaacaccatttcaaaacaaaactgtagaagcagctgctgctcccatgttattttattggggtctttggggaatgggtgggaaaggattgtttgagtattttttaaaagggaaacagtaccaaggagaccagccctaccttgatctggggatagtcttggggcaaagaaagctgcgtagtgctgaacattaagctttctgggccactggaacaaagaactaggatctcacaggaaaagctgggtaactcaagcagctattctttctgtagggaccagaacacgagaatttgaagagcatggcaaagccctttctctcccaagccccaggcagagtacaagctcatttttctcggtggttattctgatatcccattttggtgtgtcataatacttcaaactggaaagtcacctggtcgagtctagggaggagggagtggaagggtctctgcttctgtacaaaatctccaggatttacaaaaatgtaacctgccttccttcaatcccatatttggtaaataagttaatatttgacatgtttggtgttctctgacctgttccccacactggggattcctggtctgtaacttgaattgtttcttccacatgttcttaagtactagagttaaacttgtctatgtgtcttttttctctccatcctttttccttcggagaaagagctggattggctggggatatggtataacgagcctgagccttctgtacgtgtctgacactagcactgtcaggcagctttcggctggggctcacccatcccataggaggcctatgtggagcattaactgtggccaaaggaggcagcgggaacaggctgcttgctatctggaaagatgacatatttgtgccatgcttgttttttcacccaggtttttccctctttgtgagatctgagctttagtggaatgtagaatgtggcaatcttaaggtcaccaatcagtttttgttcttttttcctggatctaccctcatggtcgttttcaacatagcgggttagagttcttatactgttccagttcaattccaagaattgcaaatgtttattggacccctccatcttgatgatatataaaaattggaagccaaaccagttcttaaatgctacatgcaactcccagattccaaaggattcaagttctaattataacctttgaagcgtatagaatggaactcattcagtttgattcagttcttacctctgtcaggaggaatacagttcctgttcatcctgtgttctaagatctccattgaacagcactgatttcctttcattagcaaagtgatctttgtctctgttctaaaatggaggcagtagggagcaaaactattcttctcaagcatcctttacaccatactttacttctggtatggtttattaaccacacacacacacaaaagtgaaaaactgtgttgggggggagacactactcctacttatcttgctcataaagccttttctggtgggatattaaggccctggtgtcttacagaaaccatcacgtatgtcgcagcagcatttcacccctgaagtctctaaactctgagcctgaaaagatttgtatttaatacacataacattttttagttcattctgcctttcctatttgttccagtttttgcttggttttagtttggaggggaacttaagtacacagatccttatctctccccatcccctagcctcacaaaacacagttgagagtcttttaagtacctgagctctcgaagctacccagaactgaactagactcccctaccttagactggtaccctcaaacacaggactgaagcttaattgggaatttggctttatggagaaaagaatctttttcaaagtttgtgtcggaaggggagggtgaggtttgcccactgtctctgcaggaaggctccggcttaatctaggaagtagattccagctgcacgatgaggaacacattagcttttgggatcaaaccaggaatatgaatctgtaattattaagctcattgccaacccacaagatatgtttctgaaaacctgtagtttcttaatttaagtccatccccttcattaacgctacagttgtgactcacactgatcccaaacttttaagtgctaaatattaacatttagcattaactgtcttgtcaagcgaaaggccttctctacaacctagtccatctcacttctggtgctacctgagttggacagaattctagctcatggttgctaggaaagctaggcctctgatcatagaagcagatagcttcagtcccagtctaggcctagataaatgactcttattaccacaacccttattattttccaatttcctttctcacatactgtacacaggtagtattttcaatgtgaatccaaagcttgtctggttctctgaaaataattttttcccctttaggttctttacattgtgataatgctgtatttaaagagaatatttaaatgtaatattaaagaaatattcaaaaggaaaaaaaaaaaaaaaaagccg

SEQ ID NO: 7847 - DNA, 1844 bp, Homo sapiens
  misc_feature (661)..(681): n is a, c, g, or t
gccgtcccgcgccagggctcgctccgagagccgcttccttctcgccgcggccggcgcgggccccccggccatgcgcccccgagccccagcctgcgccgccgcggcgctcgggctctgcagccttctgctgctgctcgcgcccgggcacgcgtgccccgcgggctgcgcctgcaccgacccgcacaccgtggactgccgcgacgcgggctgcccagcgtgccagaccctttccccctggacgtgcgcaagctgctggtggccggcaaccgcatccagcggatccccgaggacttcttcatcttctacggcgacctggtctacctggacttcaggaacaactcgctgcgctcgctggaggagggcacgttcagcggctcggccaagctcgtgttcctcgacctcagctacaacaacttgacccagctgggcgccggcgccttccgctcggccgggaggctggtgaagcttagcctggctaacaacaacctggtgggcgtgcacgaggacgccttcgagaccctggagtcgctgcaggtgctggagctcaacgacaacaacctgcgcagcctcagcgtggccgccctggccgcgctgcccgcgctgcgctccctgcgtctggacgggaacccctggctgtgcgactgtgacttcgcccacctcnnnnnnnnnnnnnnnnnnnnngcatccaaactgcccaaaggccttgatgaaatccagtgctccctgcccatggagagcaggaggatatccctgcgtgagctgtcggaggccagcttcagcgagtgtaggttcagcctgtcactcacagacctctgcatcatcattttctccggtgtggccgtgtccattgcggccatcatctccagcttcttcctggccactgtggtgcagtgcctccagaggtgcgcacccaacaaagatgcggaggatgaagacgaggacaaggatgactgagccacctcctccctcctgcctcttactctccagcaccgaaccagaagctctctccaagacgagagggaaatgctgaaaatggaaaagcactggccaccatctgtgaactgaacagagcctgttccgtgtcttggcccctgggtacacctgctgggaccactgatctcagagtttagaatcagcagagcacagaagcccaggaaggatggagggaattattcctggagcataacctgcctctcagatcgaggtgtgtgttgggggagaagatgaccgagtcaggcttcatagctgatgactaaaagcctcccccaggaaatgtgaagactggcagctttcaatggcaaagatgattttacgccattctttttctgacctgtactgggagatcatgaaacatctgccttcctcccaagaaacagcagctcaaacagtggagattcaaattcggatcattcaccacaagaacgagaactttgatccttatataataggcctcagcaaccttgggatgttatactgggaactaataaactcgtgtgcaatagactcaatgtttatgttcccccagattttatatgttgaaacctaatccccaatgtgatggtatttggaggtggggcttttgggaggtgattaggtttagatcatatcatgaggatggggcccaaatgatgggattagtgccctcatgaaaggtggccccagagagctccttcaccccttcaatgcttgaggatgcagcaagaaatcagctgcccatgaaccgagaagcaggccctcaccagaacccagccatgctggcacccagatctcagacttccagcctccagaactgggagaaataaataaatgtctgttgtttgtaaaaaaaaaaaaaaaaaaaaaaa

SEQ ID NO: 7848 - DNA, 745 bp, Homo sapiens
  misc_feature (212)..(227): n is a, c, g, or t
ctggcctccaactttgtttctcgctatcctctccgccggtgccccctttcccggcggaccccgggatggtccccggcaccccgaggacgccgaggttacgggaagttcggggactggcgggagaaggggttagggggtggtccgcggcgaggggcgcggggtgcatcttctcttccttttatgggctgccacacttgtgtatcccttcttcnnnnnnnnnnnnnnnnagtgagcagtggacagcttcttccctatgagaaggaggtgaagcaggacctgaaatcccgtgctcagctcccacatgccccgtgtccaggacaagtcctttgctgaatcagcggcagacaccacccggagccctgcgggagcctttccctgttcttccagcatggatctgaaactcccttcccactttctgcagcctcccagagatagttcaggctccagcctcatgtgatagcatgaagagaaactggttccaacagctgtgtgctctgctgccctcatcccaaacaacagtttaaatgcacaattacgcttttctctaaggcccaaaataggataggaaagatcgttttgctatccctgaatgcctgtcacccttgtttcgtaaggtaagattgggaagggcttggccattgcccttgcggctgagaaaccaactttaggaataaagacactctctccatgtgtgcctgaaaaaaaaaaaaaaaaaaaaaaagagggaaaaaaaaaaaaaaaaaaa

SEQ ID NO: 7849 - DNA, 1930 bp, Homo sapiens
  misc_feature (129)..(131): n is a, c, g, or t
atctcaacaaatgtgtactgttagaagtggcttccgcttactggattaactaatactttataggcttttcaggaggccacatcactagcagtagggagaacaagatgtcatttgtgttcagtgtaagcnnngtaagcgtgggtcttcctagagtgtcctggaaatcacagcaacccattgaaaactgccctccccaccagaacgtgctacgttctttcttcatgcctatgtgtgctccattcctcatttctacttggctcaagaaaacatttctgcagtcaggtgagacttttacaaaagaggagaaaatcaatgcctccttgaacatgatgagatgtgagaacttacaatgaaaaaggcaataatgatagaaattatttcttaggtacagcaatagttgataggatgtgagggtgttaccttggggtgaagtggagaaggtcccaggtgaattggctctcatggaaatttggaattacgaaataaacgtcctgggggttacccagaatacagatttaaaagtttgcctgtagagcaaaataaaacagtcagttgtagtcattaatccttgaggcccaacgcagccgatgggttggtgtttgggaaattctgagatgggagtgagatctgatcggatcctgggaagatgtatacccagttagaacgtgtagggttctgggtccctggcaagtctaggtgggcgggtgacagggaaagcatgggcatttttgtattgctgtcacatgctaacagaggtttgtaattatcttttggacccaaattatagagacattcacgagttttctagccctcacagtaacagagctaagaattcagatgtcaggaagtctgtgaatcttgatggattttctgagaaacctgactcaatggcatatataagagggaagtaagacttttaagaaaagaaaaagttatgcctcattcctcatgtggcttccaataagtatcttaggaacttatttcctttttaaaaaatattttttaaatttttaaaatttgattttaaatttcaaataaatttaaataaattttaaataaattttaaataaaattttacagagacgtggtctcactatgttgcctaggctggattgcagtgggctattcgcagttgtaatcatagcacactgcagccctcgaatttctggggcttgagcagtcctcccgtctcagcctcctgagtagctgaagactacagggtgcacaccaccaagcctgggttttaatgatatttatttcctgttcagtgcggaaatgaattgggttcaagaactgtttcttttccccttccatggatggtcccttggaacacagaagggttatgcctggctcccagtcaggcttcatacttttggtccatgtaagtgctacccgttgctgggggaggagtcatggtttatttggaaatgtcagtgcaagtcatggctcctgtcattttgactgcacagtatcagaggagcctgttaacctctctgtgccttagtttcttagcccatgaaacgagatcattgcctgacaccagggactacctcaagggcttttgacttgaggaccggtgaccgaaggacgacgcagagcctctagctaccaacggttctccacactgactacatgctggcaatgacgggagcttccgaaaaatgttagtgccaaacttcccggtacccacggacaggtcaatcagaacccagaacgcaaatggccttggaaaggctttcacaccctcgctgcaaacgcaggccaaccactataacacagaccactgcctagcggctgaccgtccaacacacaaccccctggacacacagcccccaaagaaaacgacaaccaacacatcagcaacagcgagtgccaacaaccccagagggcccacacgcgcaccccacgccccacaacaccacgcccaccg

SEQ ID NO: 7850 - DNA, 607 bp, Homo sapiens
  misc_feature (555)..(595): n is a, c, g, or t
ttttttgattttctgaaagcaggtaggtttattagcaaacagtacaattatagacatttttatgatgactatacaaaacccagacactgtccatttgaaacacaacatttttttgcagatgattttaaaatcatttttaaaacacattcatacttaaactctattataatgaacatctcaaaatgaatgctcatgcatggggatataacatctttgtgaaaatatttggttatgagtcttgggtaaaaggcactattcactgggaaaccaattctattaataccattttccaaatgaaggagcatgtcaggcccttatcaatcacccatgctcagagaaagcactgggttttcaccaacagcaaattccccaccaaagatgctgttgtcacaatgaaacacaccctccaccatcccatcaatgtccccctgagacagtgtttagagtggaaacaaaataacttccatcacttgtgtctagggagtcaggatgctccagtggtgacaagagttaagtggagaatccaggcaaaatcttccccttccctacgcccannnnnnnnnnnnnnnnnnnnnnnnnnnnnnnnnnnnnnnnnccacattttcat

SEQ ID NO: 7851 - DNA, 3761 bp, Homo sapiens
gaggcgcagccgctcacctgcggggcagggcgcggaggagggacccgggctgcgcgctctcgggccgaggaaccaggacgcgcccggagcctcgcacgcggccaagctcggggcgtcccctcccctcggccgggcgaactcaaggggcgcagctctttgctttgacagagctggccggcggaggcgtgcagagcggcgagccggcgagccaggctgagaaactcgagccgggaacaaagaggggtcggactcagtgtgtgtgtcggctcgagctccgggcagaggcatttgggcccgaggcccccgctgtgactccccgagactccgcagtgccctccactgcggagtccccgcgcttgccggcaaaaactttattcttggcaaacttctctttctcttcccctcctcctcggcccccatcttctgctcctcctccttctctagcagattaaatgagcctcgagaagaaaaaccgaagcgaaagggaagaaaataagaagatctaaaaacggacatctccaccgtgggtggctcctttttctttttctttttttcccacccttcaggaagtggacgtttcgttatcttctgatccttgcaccttcttttggggcaaacggggcccttctgcccagatcccctctcttttctcggaaaacaaactactaagtcggcatccggggtaactacagtggagagggtttccgcggagacgcgccgccggaccctcctctgcactttggggaggcgtgctccctccagaaccggcgttctccgcgcgcaaatcccggcgacgcggggtcgcggggtggccgccggggcagcctcgtctagcgcgcgccgcgcagacgcccccggagtcgccagctaccgcagccctcgccgcccagtgcccttcggcctcgggggcgggcgcctgcgtcggtctccgcgaagcgggaaagcgcggcggccgccgggattcgggcgccgcggcagctgctccggctgccggccggcggccccgcgctcgcccgccccgcttccgcccgctgtcctgctgcacgaacccttccaactctcctttcctcccccacccttgagttacccctctgtctttcctgctgttgcgcgggtgctcccacagcggagcggagattacagagccgccgggatgccccaactctccggaggaggtggcggcggcgggggggacccggaactctgcgccacggacgagatgatccccttcaaggacgagggcgatcctcagaaggaaaagatcttcgccgagatcagtcatcccgaagaggaaggcgatttagctgacatcaagtcttccttggtgaacgagtctgaaatcatcccggccagcaacggacacgaggtggccagacaagcacaaacctctcaggagccctaccacgacaaggccagagaacaccccgatgacggaaagcatccagatggaggcctctacaacaagggaccctcctactcgagttattccgggtacataatgatgccaaatatgaataacgacccatacatgtcaaatggatctctttctccacccatcccgagaacatcaaataaagtgcccgtggtgcagccatcccatgcggtccatcctctcacccccctcatcacttacagtgacgagcacttttctccaggatcacacccgtcacacatcccatcagatgtcaactccaaacaaggcatgtccagacatcctccagctcctgatatccctactttttatcccttgtctccgggtggtgttggacagatcaccccacctcttggctggcaaggtcagcctgtatatcccatcacgggtggattcaggcaaccctacccatcctcactgtcagtcgacacttccatgtccaggttttcccatcatatgattcccggtcctcctggtccccacacaactggcatccctcatccagctattgtaacacctcaggtcaaacaggaacatccccacactgacagtgacctaatgcacgtgaagcctcagcatgaacagagaaaggagcaggagccaaaaagacctcacattaagaagcctctgaatgcttttatgttatacatgaaagaaatgagagcgaatgtcgttgctgagtgtactctaaaagaaagtgcagctatcaaccagattcttggcagaaggtggcatgccctctcccgtgaagagcaggctaaatattatgaattagcacggaaagaaagacagctacatatgcagctttatccaggctggtctgcaagagacaattatggtaagaaaaagaagaggaagagagagaaactacaggaatctgcatcaggtacaggtccaagaatgacagctgcctacatctgaaacatggtggaaaacgaagctcattcccaacgtgcaaagccaaggcagcgaccccaggacctcttctggagatggaagcttgttgaaaacccagactgtctccacggcctgcccagtcgacgccaaaggaacactgacatcaattttaccctgaggtcactgctagagacgctgatccataaagacaatcactgccaacccctctttcgtctactgcaagagccaagttccaaaataaagcataaaaaggttttttaaaaggaaatgtaaaagcacatgagaatgctagcaggctgtggggcagctgagcagcttttctccccccatatctgcgtgcacttcccagagcatcttgcatccaaacctgtaacctttcggcaaggacggtaacttggctgcatttgcctgtcatgcgcaactggagccagcaaccagctatccatcagcaccccagtggaggagttcatggaagagttccctctttgtttctgcttcatttttctttcttttcttttctcctaaagcttttatttaacagtgcaaaaggatcgtttttttttgcttttttaaacttgaatttttttaatttacactttttagttttaattttcttgtatattttgctagctatgagcttttaaataaaattgaaagttctggaaaagtttgaaataatgacataaaaagaagccttctttttctgagacagcttgtctggtaagtggcttctctgtgaattgcctgtaacacatagtggcttctccgcccttgtaaggtgttcagtagagctaaataaatgtaatagccaaaccccactctgttggtagcaattggcagccctatttcagtttattttttcttctgttttcttcttttctttttttaaacagtaaacccttaacagatgcgttcagcagactggtttgcagtgaattttcatttctttccttatcacccccttgttgtaaaaagcccagcacttgaattgttattactttaaatgttctgtatttgtatctgtttttattagccaattagtgggattttatgccagttgttaaaatgagcattgatgtacccattttttaaaaaagcaagcacagcctttgcccaaaactgtcatcctaacgtttgtcattccagtttgagttaatgtgctgagcatttttttaaaagaagctttgtaataaaacatttttaaaaattgtcatttaaaaaaaaaaaaaaaaaacggggacaaaagaacaaacagagacaaaccaacactgtgggcgccacgcgaccgcccagagaaagcttaaaacaaaatggtgacggcggcgcccatagtgtaacaccagtggtcacagacgctcccaggaaactcgggcaacaaagggcgtgtgcccaccaaaaaacccggggaaca

SEQ ID NO: 7852 - DNA, 3862 bp, Homo sapiens
  misc_feature (1943)..(1972): n is a, c, g, or t
  misc_feature (2175)..(2200): n is a, c, g, or t
tttttttttttttttttttgcaagttcatattttatttccaataggtttggagctttgttgatttttgcatttttgtaaaaaaggaaaaagttttcacttaattcattgaaagccctttcgtgctgagcccaagggggagcctgggccaggaccagaccctctcagccctcttgttcctaccgcagacacccggtgctgggggtgcggctgctcccctccgcccactctgccctcccgcccctgctgcatctctctctgtacagaacaatttttaaaatggaagctaagacacaatatacactggacaggcacacacacacgcacacaggcgtccgcccagaacagggcgggacaccagctgcactcagagagcaccaaggaatgcaaacggagcccctccgggtaggagggcagggcctgggcccccttggtcctcagtcctcagtccgcactcctccccgccaattgccctgctagctgccagagaggggagggggcagggagagctgggggcagctggttgggggcggtggtcatagaatgagtaccagcctggtaggcggccctggggccagggaggctcttgtggggagtccggggaggggcggcggggggaaggactgagggtggaccctcaggaacctgagggctggaactcctgggccttgcccctcaaggagcttcaagggcccaggtgtcaggagtggggctggccctgcagcactggcctccagcccttgctgttctccccaagactaaattaacatttggtaaacttaggagctaagccagctgagacccccagcactccccctcgggcctccctgaggccctcacagctgggggccaggcctgctctgggggacccacgtcttccacactccacccttgccctggcaaggaggtagggggagcagggcctgccctgagggcttctcccttccccttagtgccttccagtcccacccttccctgctcaggccccaggaagaagttaaaaatagttagttcctacattaaaaaagagacagaaccagattctctgccaaaaggccagtgggagaagaggggatgtcatctctgcagtgggaagggcagggagtgggtaggggaggactgcaaaatagtttcttcttttaaaaagtgcttggtaagtcttttaaagtgtgtgtctatatctatgtacagatatacacacagacactgtccacaccaccacgcatacctgcacacatacggaaatgtatacatatacatacatacggaaatgtatacatatacataatcatatacatatacatacatacatacacatatatatatatattcatatatatatatatactttaaaaagtcctaggtgagaagatctgggccaggctgggccaggcctgcagggtcacgactggagggtgtgggcccggccaggctggcagatggggcactcgctgccctcagcgcagagctcacacagcgcagcgtgttggcacggcagcactgcccgcttctgttcctgacacttaaggcatttcaccgactgcatgtggaacacggccttgtccacttgttccaggtgggcccgcagttgtttctggagggagtagagggtggagagtgagagcgcctccaggtcggagaaggcgggcagggcctggggctcaggccccgcgtgtagccgctccagctcctcctggagcttcttcacctgcacctccagtgcatcccgctgctcccgggccagctcgcactcggcgcccgccgcactggcccgctcaccagcctcctccgcctctttcttccaggcatcacaagcctgcttggcctgcttccaggactcctcccactgcttgatggtgctgttggcttcatccagctcttgccgaagtcgggccagctcggcagcccctggccctgataggaaagcgggggaagtgcccggggnnnnnnnnnnnnnnnnnnnnnnnnnnnnnnagatgctgctgttcatcccgttcagacccaaagatccatgtgatgctgaggttcccaaaaatgtgttttccgactgactcaggtggccctggggctgctgcaggaaatgcgaggagaggctgacgggaggggacggggatgctgagtggaaggaggcagagctgcccaaggagccggggatgttcacgggcgcagagctctgnnnnnnnnnnnnnnnnnnnnnnnnnncttcctgggtggggcactgtgctgttatcgaaagtcttctccagggcggccacgccaaactcattcaggtccaggtcatccaaagcagactctatgactgactctaccgtgtcgctggtggggtagaagggcagagcgtttgcattcatgccggggacgctgctggtgcccactgggctagggggggtagctgccaggctggaggtgatactagaagagatgcttgaggtcagggggctgcctgcggggaggatgcccagcatgtcctgtttgggctgaagcagaggctgctcttgactcctgggctctaatgagtggggttttaatttggcctggcatttgaaatttttcaggtactcggctcccacctggtcttccctctcgaagccgggagccttcttatagctgccaggggccaggccagactccccagggaagacgatgccctccaggtttgggggcttcctgatggagcccggtggggagccgcagaggttagacgggctgcctaggctgctgtttctacagaggagggcactgaggtcaggggcatgcgggctggaggggctcacaggcaccgagtctccggcggcagatggcatgtacaggacaggacccggctgggtggggctggacacagctgaggaaggctgcaggtcgtcactcaggggtggctgttctacgtgggcaaaggcgcagaagggtcctcggggacagctgcccgactgctgcatgtcgttgcacttggtggacttgtagatctcggggtggaactgctgctcggtgcgggtgtggcagtactggcaggcgtctccgttctcacacttgccagggtctccccactcatccccgtgcttgacgtttggacatggagacgacctgtatttgtgcttccgggggctccgccgccggtccttgctgttgtggtagtagggacaggcatagccttggcggcacagccgcgggggcttcttgcaaggctccgtcttatagttccccagcacataagcagtctcttgccaccgaggctcctcgctgaggatcttttctatcatggcatggctcgcagccccagccgactggccctctatgctcccctctaccgtggtctggccattctgcaaggcctccatggcctgaagctccctgatgtcgtagacaggggagcggaggtcatggggcccgtgggcaaaagcgcagtgcaggccgtttttggtgcagttgcctttcgagtctgtctcgtggatgcagattccagttttgtagtaacgaaggtggtacctgcgctcagtgtcccctgtggttctgtgcaggaatgggcactcgtcgccctccgggcagaggcctgtagcctcgtcgtacttggtgcagtagacgtcagggctgtaattgaaggtgccgtcccgacggcggatggaccggcggcgccgctggttcacgaagtgccagtggaagcaggtgtagggccgatgctgcgtgcatttgtgttgcacaaagagtgggcactgctctgtgcggaattctttcaggtacgtgtagtgctgcggtttctcgggctgtgcctgcagcacctgagcggtagcggccgggggcgccgaggaagctgcggagccgccgggcccggggcccttcgacatggtcttgtcttcctgcctcttcgcc

SEQ ID NO: 7853 - DNA, 983 bp, Homo sapiens
  misc_feature (8)..(8): n is a, c, g, or t
cgccgatnagcgagaaggagctgctgctggcccggccgtccccacgcacctccttccaagaggagaagagcgctgtcatttaggcacagtgcaggcagggggagctggccccgacctccctgctgcgctcgggggcacgggcctgcctggggaagcagctggggggctctgcctgggccctggccacatgcagccctgcgtgtgtcccctcgacgccacgtgtagtgagccctgacccactggacatggggactctttccagtccggagagctccttgtctgtgtccccagcagaaggtggggtggctcctgcctcaccctctgcccagccctgatccaggccacagccatctagggccctgaaggaggggcaggaggcaggggtggcttctggaacctgaggcttggccccggttgggtctgttcttgcgggctgcactgctggatcccaggagcaggtgtggaacagccccatggccagggtgacggaaatcctcggctgcatgcagacatagacccaccctggactgggctgtctccggagcctagacacatcgccctgggaaggggcagctgggcctgcagtgtgctgggcaggggctggcggccctggtcgtgggctctccagggtccctcaggggattgggcctctccccaggcaggaaggtgggaagtgcaggcatgacccggggttcctgaggctggtccaccaagttgcttctgagacgccttcgcttctgtcctggctggctgttaatgatatccctgttctaattccactctggctaaactgaaagtaaagatccttaagcttaaaaaaaaaaaaaaaacaaaatcaaaataaaaacaaaagcacccgagtctccaacaggaaaaaaaaaaaaaaaaaaaaaaaaaaaaaaaaaaaaaaaaaaaaaaaaaaaaaaaaaaaaaaaaaaaaaaaaaaaaaaaaaaaaaaaaaaaaaaaaaaaaaaaaaaaaaaa

SEQ ID NO: 7854 - DNA, 2734 bp, Homo sapiens
ggaagcagggcggggcctctggtggcggtcgggaactcggtgggaggcggcaacattgtttcaagttggccaaattgacaagagcgagaggtatactgcgttccatcccgacccggggccacggtactgggccctgtttccccctcctcggcccccgagagccagggtccgccttctgcagggttcccaggcccccgctccagggccgggctgacccgactcgctggcgcttcatggagaacttccaaaaggtggaaaagatcggagagggcacgtacggagttgtgtacaaagccagaaacaagttgacgggagaggtggtggcgcttaagaaaatccgcctggacactgagactgagggtgtgcccagtactgccatccgagagatctctctgcttaaggagcttaaccatcctaatattgtcaagctgctggatgtcattcacacagaaaataaactctacctggtttttgaatttctgcaccaagatctcaagaaattcatggatgcctctgctctcactggcattcctcttcccctcatcaagagctatctgttccagctgctccagggcctagctttctgccattctcatcgggtcctccaccgagaccttaaacctcagaatctgcttattaacacagagggggccatcaagctagcagactttggactagccagagcttttggagtccctgttcgtacttacacccatgaggtggtgaccctgtggtaccgagctcctgaaatcctcctgggctgcaaatattattccacagctgtggacatctggagcctgggctgcatctttgctgagatggtgactcgccgggccctattccctggagattctgagattgaccagctcttccggatctttcggactctggggaccccagatgaggtggtgtggccaggagttacttctatgcctgattacaagccaagtttccccaagtgggcccggcaagattttagtaaagttgtacctcccctggatgaagatggacggagcttgttatcgcaaatgctgcactacgaccctaacaagcggatttcggccaaggcagccctggctcaccctttcttccaggatgtgaccaagccagtaccccatcttcgactctgatagccttcttgaagcccccagccctaatctcaccctctcctccagtgtgggcttgaccaggcttggccttgggctatttggactcaggtgggccctctgaacttgccttaaacactcaccttctagtcttggccagccaactctgggaatacaggggtgaaaggggggaaccagtgaaaatgaaaggaagtttcagtattagatgcacttaagttagcctccaccaccctttcccccttctcttagttattgctgaagagggttggtataaaaataattttaaaaaagccttcctacacgttagatttgccgtaccaatctctgaatgccccataattattatttccagtgtttgggatgaccaggatcccaagcctcctgctgccacaatgtttataaaggccaaatgatagcgggggctaagttggtgcttttgagaaccaagtaaaacaaaaccactgggaggagtctattttaaagaattcggttgaaaaaatagatccaatcagtttataccctagttagtgttttgcctcacctaataggctgggagactgaagactcagcccgggtggggctgcagaaaaatgattggccccagtccccttgtttgtcccttctacaggcatgaggaatctgggaggccctgagacagggattgtgcttcattccaatctattgcttcaccatggccttatgaggcaggtgagagatgtttgaatttttctcttccttttagtattcttagttgttcagttgccaaggatccctgatcccattttcctctgacgtccacctcctaccccataggagttagaagttagggtttaggcatcattttgagaatgctgacactttttcagggctgtgattgagtgagggcatgggtaaaaatatttctttaaaagaaggatgaacaattatatttatatttcaggttatatccaatagtagagttggctttttttttttttttttggtcatagtgggtggatttgttgccatgtgcaccttggggttttgtaatgacagtgctaaaaaaaaaaaagcattttttttttatgatttgtctctgtcacccttgtccttgagtgctcttgctattaacgttatttgtaatttagtttgtagctcattaaaaaaatgtgcctagttttataaaaaaaaaaaaaaaaaaaaaaaaaaaaaaaaaaaaaaatgcccgtcccccttcgccccctcaagaaaccttccaaaaccctttccttctgggggcggcgggcctttccccgcaagccgaacatgggtccaaccctggtttccctaggaaaaccctgggcccttaaccactggcctggggatttttcccccattaacaaacccccccggggtatcacccaaacgttctcgtaataaccccttacccgcggagctccttagcggcctttcccggcggctttttccacctggggagttccacggcccgcctcccagttttccccatattattcctcgcgcccttggcccatttatttatcattatttggcccccccctctctttatagccatttttgtgcggacccgcgcgcaccttattataaccacccccctcctcgatattttt

SEQ ID NO: 7855 - DNA, 518 bp, Homo sapiens
ggctttcgagtgtgacacactggataataatgaaatagtagcaactattaaattcacagtctatacgagcagtgtgaattgcaaagccctgtccgtgatgtctcctacatgttgccttgaaactgtccatcgcctttcattactcctgtgactgccctagttcaggctgccccgtctctttatgtagatgctttttaaaacaatctcatgacttgcttctccaactatgagagagcttttaaatgcaacttttacaattttacacgggcagcagtcaaggctttctggggggcaaaagcctctacacctgaggtacaatccgagcagagttctgtgagatacaaagattcaacttctcttgaccaattaccaacagaaatgcctggtgaagatgatgctttaagtgaatggaatgaatgatgtttgaatgatatataacaaaccaaaggatattacagaatattagaatcaccccccaaaaataaaatacacattgaaataatttaaaaaaaaaaaaa

SEQ ID NO: 7856 - DNA, 4250 bp, Homo sapiens
  misc_feature (455)..(460): n is a, c, g, or t
  misc_feature (2782)..(2831): n is a, c, g, or t
  misc_feature (4043)..(4043): n is a, c, g, or t
  misc_feature (4110)..(4110): n is a, c, g, or t
  misc_feature (4179)..(4179): n is a, c, g, or t
  misc_feature (4194)..(4194): n is a, c, g, or t
gggtggcgattcgaaacgaggtgcggagttttggggatgtagagagagagagaggagagagaaagacacacgcacgcagagacacacggtcactggaattccattagaaaaaagtgagccgagcaagggttagcgggagaagatttttttgaatcttgtcttcgtcttggtgcgaaagaagcgactccagtctctcgtcctcgaagctccgactggattgttcttgggcgctgacacccgtctgtggatttcttttctatttgcattttattccgaccccctccctcgccgcttccttccagcccttcactcgcaaatcgcctctctccccacctccccaggcccctcctgggaagcgcaggggaattggacccgcggggactcacgccttcccggacgattggaggggagggctgaccccaggactgggctgttggcttagaaagccgatacannnnnntttttttttttgattgtagcgggcaaggggggcgtcgagaggcagcagcccatcgcccgcctctcaccccaccccctccagccagaggcgagaatcgcaggactcgggatcttcatcgggtggactagctgggatctccgcattggatttggggctgattaccactgcttgcctattattattgttgttgttactactattatttttttttacccaagggagaaagacaaaaaaacggtgggatttatttaacatgatcttggcaaacgtcttctgcctcttcttctttctagacgagaccctccgctctttggccagcccttcctccctgcagggccccgagctccacggctggcgccccccagtggactgtgtccgggccaatgagctgtgtgccgccgaatccaactgcagctctcgctaccgcactctgcggcagtgcctggcaggccgcgaccgcaacaccatgctggccaacaaggagtgccaggcggccttggaggtcttgcaggagagcccgctgtacgactgccgctgcaagcggggcatgaagaaggagctgcagtgtctgcagatctactggagcatccacctggggctgaccgagggtgaggagttctacgaagcctccccctatgagccggtgacctcccgcctctcggacatcttcaggcttgcttcaatcttctcagggacaggggcagacccggtggtcagcgccaagagcaaccattgcctggatgctgccaaggcctgcaacctgaatgacaactgcaagaagctgcgctcctcctacatctccatctgcaaccgcgagatctcgcccaccgagcgctgcaaccgccgcaagtgccacaaggccctgcgccagttcttcgaccgggtgcccagcgagtacacctaccgcatgctcttctgctcctgccaagaccaggcgtgcgctgagcgccgccggcaaaccatcctgcccagctgctcctatgaggacaaggagaagcccaactgcctggacctgcgtggcgtgtgccgggatgaccacctgtgtcggtcccggctggccgactttccatgccaattgtcgagcctcctaccagacggtcaccagctgccctgcggacaattaccaggcgtgtctgggctcttatgctggcatgattgggtttgacatgacacctaactatgtggactccagccccactggcatcgtggtgtccccctggtgcagctgtcgtggcagcgggaacatggaggaggagtgtgagaagttcctcagggacttcaccgagaacccatgcctccggaacgccatccaggcctttggcaacggcacggacgtgaacgtgtccccaaaaggcccctcgttccaggccacccaggcccctcgggtggagaagacgccttctttgccagatgacctcagtgacagtaccagcttggggaccagtgtcatcaccacctgcacgtctgtccaggagcaggggctgaaggccaacaactccaaagagttaagcatgtgcttcacagagctcacgacaaatatcatcccagggagtaacaaggtgatcaaacctaactcaggccccagcagagccagaccgtcggctgccttgaccgtgctgtctgtcctgatgctgaaacaggccttgtaggctgtgggaaccgagtcagaatatttttgaaagctacgcagacaagaacagccgcctgacgaaatggaaacacacacagacacacacacaccttgcaaaaaaaaaattgtttttcccaccttgtcgctgaacctgtctcctcccaggtttcttctctggagaagtttttgtaaaccaaacagacaagcaggcaggcagcctgagagctggcccaggggtcccctggcaggggaaactctggtgccggggagggcacgaggctctagaaatgcccttcactttctcctggtgtttttctctctggacccttctgaagcagagaccggacaagagcctgcagcggaagggactctgggctgtgcctgaggctggctgggggcaggacaacacagctgcttccccaggctgcccactctggggacccgctgggggctggcagagggcatcggtcagcggggcagcggggctggccatgagggtccaccttcagccctttggcttcaaggatggagatggttttgccctccctctctgccctcgggtggggctggtgggtctgcagctggtgtgggaacttccccacggatggcggtggagggggttcgcaccgtgctgggctccccctgactgtagcacggagtgttggggctgggggccagctccaggagggctnnnnnnnnnnnnnnnnnnnnnnnnnnnnnnnnnnnnnnnnnnnnnnnnnntgggcaccaaaatctttctcggtggcagaaattttgaagtcagagagaaacggtcctttgttggcttctttgctttctcgtgggtcctttggcaggcctccctttggggagagggaggggagagaccacagccgggtgtgtgtctgcagcaccgtgggccctcaagctttcctgctgtcttctccctcctcctcctttcccctttctctttcctcatttcctagacgtacgtcaactgtatgtacataccggggctcctctcctaacatatatgtatatacacatccatatacatatattgtgtggtttcccctttctttcctttttttaagcaacaaaactatggaaataataccccaacagatgagcgaaaatgtattattgtaaagtttattttttttaatactgttgtctataatggggaaaaaggacattggccccgcagtgccctgccccagtcagcctggctgggctctggtgggggctcctgatccgcatccaagcttaaccaaggctccaataaacgtgctaggaagcaagctgagaaatagagaggccctatggagccgcagcaaagaccaaagagcgaagtccccggtccccgagacccagggggccggccgggcagtgtacccccggtgcacaaggacttactgaactaggaggtgcgggggggggcgccgccccccgagaaaccctcttctctgcgcgggggagtctccccgggggacttctcgcgcaaagcccgcactcatgttatcattatcaaacgcaagaaggagggcgccctaccaccacacagaacggcagtcaatccctacccattcttaatataaggggacaactctcgtggctgcgtcacgcgcggggggcgggccgatgagaatgtgggcggacgaaaaatgcactggtacgggggcccctgcatccggcgaggagaaaaacatacgttcttcgcctccctgccgcagagcgggcggctaccctcatacgagggtggggggaaggaccagccctcttgtctacctccgtcgtggggtactgtagatggggtggggcgccgccttactttcttgggctgagggcgtggggccacgcaagccgcggggaccgccagcgacaggaaaagagggggagcatcgaccacgccccccggccttaaaacaaaccccccccgcccccgcgaccggcgccgcctccctttccgtcgcncagcctctccactactatcgcgggtggcggagggccctcatgcgtggcacctacggtcgccgccttngacaataagaaaggagggggcggccgacggagggcgagaaggaaaagacaggaagctcctcgtcctggntccggcaagggaccnggtacggcgaagaaaataaatgagtggagggaagagggacgtctcgacctcccctc

SEQ ID NO: 7857 - DNA, 3209 bp, Homo sapiens
agatggagtttcttttcaggaagaacactctgacagctgcatggaagcccagacaccaggaaaccctcagattggaggctggtgtcccggagcagtgcaaggctgcctggtgccccgaggaggctgctgagccccaggccatggtcccctctcgcaggacgtggaacctgggagccacgccctcgctgcggggcctgtggagagtgggccgggccccggagcccgagccggggatggctcgccccgccccagccccagccagcccggccgcccgccctttcccacacaccggcccggggaggttgagaactgggcgtggaaaagataccccagtccctggaagaggacaagaaccgggccattgaggaggcctttgccagagcccaggtggagatgaaggctgtgcacgagaatctagcaggcgtccggaccaacttgctgaccttgcagccggcactgcggaccctcaccaacgactacaatgggctcaagcggcaggtgcgcggcttcccactgctgctgcaggaggccctcaggagtgtcaaggccgagataggccaggccatcgaggaggtcaacagcaacaaccaggagctgctgcgcaagtaccgccgcgagctgcagctgcgtaagaagtgccacaatgagctcgtgcggctgaaagggaacatccgagtgattgctcgtgtccggccagtcaccaaagaggatggggaaggacctgaggccaccaatgctgtgactttcgatgccgacgacgactccatcatccacctgctgcacaagggcaagcctgtgtccttcgagctggacaaggtcttctccccacaggcctcgcagcaggacgtgttccaggaggtgcaggccctggtcacctcttgcattgatggcttcaatgtctgcatctttgcgtacggccagacgggcgccggcaagacgtacacgatggaggggaccgctgagaacccaggtatcaaccagcgggccctgcagctgctcttctccgaggtgcaggagaaggcgtctgactgggagtacaccatcaccgtcagcgctgcggagatctacaatgaggtcctcagggacctgctagggaaagagcctcaggaaaaactggagatccggctgtgcccagacggcagtgggcagctgtatgtaccagggctgagaaggcacaggaggaggagcggcttagtcggcgcctgcgtgacagccacgagaccattgccagcctgcgggcccagtccccacctgtcaagtatgtcatcaagacagtggaggtggagtcgtccaagaccaagcaggccctcagcgagtcccaggcccggaaccagcacctgcaggagcaggtggctatgcagaggcaggtgctgaaggagatggaacagcagctgcagagctcacaccagctgaccgcgcggctccgggcgcagattgccatgtacgagtcagagctggagcgggcccatgggcagatgctggaggagatgcagtccctggaagaggacaagaaccgggccattgaggaggcctttgccagagcccaggtggagaatgagcgactgaggcaggagatgcggcgctgtgaggccgagctgcaagagctgcgcacaaagccagcaggtccctgcccaggttgtgagcacagccaggagagcgcccagctccgtgacaagctgtcccagctgcagctggagatggcggaaagcaaaggcatgctgtcagagctgaacctagaggtgcagcagaagaccgaccggctggctgaggtggagctgcgactcaagggctgcgtggctgagttccaagtgcagagcgtggacgacatcaacaaggtgtttgagtttggccacactaatcgcacgaccgagttcaccaacctgaacgagcacagctcccgctcgcacgcgctgctcatcgtgacggtgcgaggcgtggactgcagcacaggcctccgcaccacggggaagctgaacctggtggacttggctggctcggagcgcgtgggcaagtcgggggccgagggcagccgcctgcgggaggcgcagcacatcaacaagtcgctgtcggctctgggggacgtcattgctgccctgcgctcccgccagggccacgtgcccttccgcaactccaagctcacctacctgctgcaggattcgcttagtggtgacagcaagaccctcatggtggtacaggtgtcccccgtggagaagaacactagcgagacgctctattccctcaagtttgctgagagggtgcgctctgtggagctggggcctgggctacgcagggcagagcttgggtcctggtcaagccaggagcatctagagtgggagccggcttgtcagacgccacagccctcggcacgggcccactcagcccccagctctgggaccagtagccgccctggatccatccggaggaagctgcagccctcggcctgacggctggggctgcagagtctctagggaagtcgcggccactgcctgtgtgacggatgtgaccccgctgggcctgaagctgggccctcactggcctgtccctgctgcagcgccaggacccccggaggtagaggcgagagtggaggctcttcttctgccccgtctcccctcaaagatgagaaacatgttcagaaggaaacggtgtctctcggctgtggctctgagtgcaaattgcatgggcggaaaggcgggggtggctgctcttcctggcaggcctgggccatcagcgaactgggccccgtgaggagggcgggagtgtggaggagggtgggcctctcacccaggctttctcggcccctctcctcagcttgcagagctggccagccccctccttagggggtgggcgaggagcctctgggcagacccaagaaccatggggactggggtgggttggtggcaccaatggcagccctccccgcccctctccttcaaggagggttcccgcagctggggggtgtgcggaggcgcatggcctcccgccacggggccgtgctgtgtttatggctggcagaggcagccagcgggtgggggattctgctgctcgctcacctgcctggctcgctggtctctcgaattttcttccctctgaaatcctatttaagaacttttggaagcttagccatttttacttattaaaataaaagaagcctttttacacaaaaaaaaaaaaaaaaaaaaaaaaaaaaaaaaaaaaaaaaaaaggggggg

SEQ ID NO: 7858 - DNA, 498 bp, Homo sapiens; identical to SEQ ID NO: 3952

SEQ ID NO: 7859 - DNA, 2760 bp, Homo sapiens
  misc_feature (1477)..(1505): n is a, c, g, or t
  misc_feature (1695)..(1710): n is a, c, g, or t
agctggggctccgtcctcgcctcccacgagcgatccccgaggagagccgcggccctcggcgaggcgaagaggccgacgaggaagaccctggagcataactgtgcccacttctgcatcaacatccctggctcatacgtctgcaggtgcaaacaaggctacattctcaactcggatcagacgacttgcagaatccaggatctgtgtgccatggaggaccacaactgtgagcagctctgtgtgaatgtgccgggctccttcgtctgccagtgctacagtggctacgccctggctgaggatgggaagaggtgtgtggctgtggactactgtgcctcagaaaaccacggatgtgaacatgagtgtgtaaatgctgatggctcctacctttgccagtgccatgaaggatttgctcttaacccagatgaaaaaacgtgcacaaagatagactactgtgcctcatctaatcacggatgtcagcacgagtgtgttaacacagatgattcctattcctgccactgcctgaaaggctttaccctgaatccagataagaaaacctgcagaaggatcaactactgtgcactgaacaaaccgggctgtgagcatgagtgcgtcaacatggaggagagctactactgccgctgccaccgtggctacactctggaccccaatggcaaaacctgcagccgagtggaccactgtgcacagcaggaccatggctgtgagcagctgtgtctgaacacggaggattccttcgtctgccagtgctcagaaggcttcctcatcaacgaggacctcatgacctgctcccgggtggattactgcctgctgagtgaccatggttgtgaatactcctgtgtcaacatggacagatcctttgcctgtcagtgtcctgagggacacgtgctccgcagcgatgggaagacgtgtgcaaaattggactcttgtgctctgggggaccacggttgtgaacattcgtgtgtaagcagtgaagattcgtttgtgtgccagtgctttgaaggttatatactccgtgaagatggaaaaacctgcagaaggaaagatgtctgccaagctatagaccatggctgtgaacacatttgtgtgaacagtgacgactcatacacgtgcgagtgcttggagggattccggctcgctgaggatgggaaacgctgccgaaggaaggatgtctgcaaatcaacccaccatggctgcgaacacatttgtgttaataatgggaattcctacatctgcaaatgctcagagggatttgttctagctgaggacggaagacggtgcaagaaatgcactgaaggcccaattgacctggtctttgtgatcgatggatccaagagtcttggagaagagaattttgaggtcgtgaagcagtttgtcactggaattatagattccttgacaatttcccccaaagccgctcgagtggggctgctccagtattccacacaggtccacacagagttcnnnnnnnnnnnnnnnnnnnnnnnnnnnnncatgaaaaaagccgtggcccacatgaaatacatgggaaagggctctatgactgggctggccctgaaacacatgtttgagagaagttttacccaaggagaaggggccaggcccctttccacaagggtgcccagagcagccattgtgttcaccgacggacgggctcaggatgacgtctccgagtgggccagnnnnnnnnnnnnnnnnggtatcactatgtatgctgttggggtaggaaaagccattgaggaggaactacaagagattgcctctgagcccacaaacaagcatctcttctatgccgaagacttcagcacaatggatgagataagtgaaaaactcaagaaaggcatctgtgaagctctagaagactccgatggaagacaggactctccagcaggggaactgccaaaaacggtccaacagccaacagaatctgagccagtcaccataaatatccaagacctactttcctgttctaattttgcagtgcaacacagatatctgtttgaagaagacaatcttttacggtctacacaaaagctttcccattcaacaaaaccttcaggaagccctttggaagaaaaacacgatcaatgcaaatgtgaaaaccttataatgttccagaaccttgcaaacgaagaagtaagaaaattaacacagcgcttagaagaaatgacacagagaatggaagccctggaaaatcgcctgagatacagatgaagattagaaatcgcgacacatttgtagtcattgtatcacggattacaatgaacgcagtgcagagccccaaagctcaggctattgttaaatcaataatgttgtgaagtaaaacaatcagtactgagaaacctggtttgccacagaacaaagacaagaagtatacactaacttgtataaatttatctaggaaaaaaatccttcagaattctaagatgaatttaccaggtgagaatgaataagctatgcaaggtattttgtaatatactgtggacacaacttgcttctgcctcatcctgccttagtgtgcaatctcatttgactatacgataaagtttgcacagtcttacttctgtagaacactggccataggaaatgctgtttttttgtactggactttaccttgatatatgtatatggatgtatgcataaaatcataggacatatgtacttgtggaacaagttggattttttatacaatattaaaattcaccacttcagagaaaaaaaaaaaaaaaaaaaaaaaaaaaaaaaaaa

SEQ ID NO: 7860 - DNA, 1028 bp, Homo sapiens
  misc_feature (92)..(93): n is a, c, g, or t
tcccaaaacgcgcagggaggttcaaccgtgcccggtcccagatgtcctgcccacccgggaggtggaatcagtatatccaggacacgctgcanntgcgtcaagccactcctgaagaaagaatgatgtggagaaagtggtggtggtgattttggataaagagccccgcccagtggagaaattcgtctttgagatcacccagcctccactgctgtccatcaggtgggctgcccctgcccctcgcccactagctggcatcagctcagactcgctgttgtctcatgtggagcagctgctccgggccttcatcctgaagatcagcgtgtgcgatgccgtcctggaccacaaccccccccagggctgtaccttcacagtccttggtgcacacgagagaagccgccacctcgcaacatggagaagatccaggtcatcaaggatttcccctggatcctggcggatgagcaggatgtccacatgcatgacccccggctgataccactaaaaaccatgacgtcggacattttaaagatgcagctttacgtggaagagcgcgctcataaaggcagctgagggggcacctgccaccccactgatgcccaacttgtcaagacttttgggggatccccgcctagggcagtgctgcatggctgccctgattccaagtgctcttatcgcctctgtgtgtggatcgcccgccccagcccggggccgctcaggtctgcttggaggatgcctcccccaggagggcagtgagggatgccgcaacctcgacttctcagcctcctggggttccgccggccaacactgtctgtctcaaatactgtgctgtgagttgtttcaataaaggggccccaagggctgggctgaaaaaaaaaaaaaaaaaaaaaaaaaaaaaaaaaaaaaaaaaaaaaaaaaaaaaaaaaaaaaaaaaaaacaaaaacaaaaaaaaaaaaaaaaacagaaaaaaaaaaaagagaaaaaaaacaacacaaaaaacaggaggggggggggagcgccagctctcacacggg

SEQ ID NO: 7861 - DNA, 1681 bp, Homo sapiens
  misc_feature (81)..(117): n is a, c, g, or t
  misc_feature (1068)..(1068): n is a, c, g, or t
gtgtgtgtgtgtgtgtgtgtgtgtgtgtgtgtgtgtgtgtacacgagcgcgtgcctctctctgatcacaggtagcactcannnnnnnnnnnnnnnnnnnnnnnnnnnnnnnnnnnnnatttgaccagaacgtgtgcagctcagccagccacagaactggaatttttcaggagcagggggagcatggagtttggactttgctgagcaactgaagtggagcgcagagcttgctcgcttaggagagagcatcatggatggcaaacaagggggcatggatgggagcaagcccgcggggccaagggactttcctggcatcaggcttctttcaaacccattgatgggcgatgctgtgtctgattggtctcctatgcatgaagctgcaatccacggacatcagctgtctctgaggaacctcatcagccaggggtgggctgtgaacatcatcacggcagatcatgtttccccactccatgaagcctgtcttggaggtcatctctcttgtgtgaagattttattaaagcatggagctcaggtgaatggtgtgacagcagactggcacactccactgtttaatgcttgtgtcagcggcagctgggattgtgtgaatttgcttctgcagcacggagccagcgttcaacctgagagtgatctggcatcccccatccatgaagctgctaggagaggccacgtggagtgtgtcaactctcttatagcttatgggggcaacattgaccataagatcagccacctgggcactccactctatttggcttgtgaaaaccaacagagagcctgtgtcaagaagcttctggagtcaggagcggacgtgaaccaagggaaaggtcaggattccccacttcatgcagtggccaggacagccagtgagagctggcctgcctgctcattggattttggagcggacacccaggccaagaatgctgaaggcaaacgtcctgtggagctggtgcctccagagagccccttggcccagctcttcttggagagagaagggcccccttctttgatgcagttatgccgccttagaattcggaagtgttttggaatccancagcatcataagataaccaaactcgtcctcccagaggatctgaaacagtttctcctacatctttaaatgcatctagggaatggattcacaaacgatgtgaaaacattattgagtgttgtagccactagaattttaaaatcaagttggatttatagagtttgactagttttttcgattagatttgtatttgttataaacttgtttatggagtttgactaattttttctattcaatttgtatttgttaaactcaagccagggtggaaagacactgcatacgtttgtattattagttagaaggcatgaagacttttttccctgcttggagagtgtcataagttattgttttgcatatctactgcatgccaagcactttctgcatcatctaatttagccctcacagccactgggtcaagatgtccaattttccagagtaaggatagaggagtcaaattcaaatacaggttttctgacattaacttatgtgatgacttgatcgaggcaggcttttccagcatcactgtcctggttccatctctgctatatgggaatgaaaataaagaaacatatttcttggcttgtctaaaaaaaaaaaaaaaaaaaaaaaaaaaaaa

SEQ ID NO: 7862 - DNA, 1991 bp, Homo sapiens
  misc_feature (142)..(185): n is a, c, g, or t
  misc_feature (1980)..(1981): n is a, c, g, or t
gtcgaacaccgttttcccgaatctcctcggcatcaagtgggaagtggagccgagcggcagctggcaggttttctccgcggtcggcaccagcgccctgcagcccgggcgggggccgctgggctgcctctgccaggcgtgcttnnnnnnnnnnnnnnnnnnnnnnnnnnnnnnnnnnnnnnnnnnnngaaaaaactaattatggttcagcactggcctgagacagtatgcgagaaaagttcaaaacgactggtagagagcctcgggatatactggacaatacatggactatggcccgataaaagtgaaggatgtaatagatcgtggcccttcaatttagaagagattaaggatcttttgccagaaatgagggcatactggcctgacgtaattcactcgtttcccaatcgcagccgcttctggaagcatgagtgggaaaagcatgggacctgcgccgcccaggtggatgcgctcaactcccagaagaagtactttggcagaagcctggaactctacagggagctggacctcaacagtgtgcttctaaaattggggataaaaccatccatcaattactaccaagttgcagattttaaagatgcccttgccagagtatatggagtgatacccaaaatccagtgccttccaccaagccaggatgaggaagtacagacaattggtcagatagaactgtgcctcactaagcaagaccagcagctgcaaaactgcaccgagccgggggagcagccgtcccccaagcaggaagtctggctggcaaatggggccgccgagagccggggtctgagagtctgtgaagatggcccagtcttctatcccccacctaaaaagaccaagcattgatgcccaagttttggaaatattctgttttaaaaagcaagagaaattcacaaactgcagctttctaaaaaacaactccaaagtgaagtctgtttattttgctgtttcccctccatgcctgtgaattggatgttgtggtccctgtagagtgagtgcatgtggcgtacacggggagaacaggagctctcccacgcctgagtggctgttttgtgcttgggataaagctcacagattgtttttttttttctctattaaagctcttcagtgccctggtagatcaggcaggcatacttggaatttagacagatggcaccgattcaggggactctcttgctcgagttttcccctcggagcctgttgccttcttggcgcagggaccctgtcaagacgaagagctccacgcatggcaggagcccacgctgatgcctggtgggcctggggggtgtctctagctcagactgggtctgttccatgtgaccagagccccaggacatcgttccttagccagctgctccgttgttggaggcctggtgtggtcacaggtgtgtcctagaacggtgactttgcccctcctgccctaggagatttgggtgtattcacagagcagccatctcctgtctccgtcagagcagtctcttccaggttactggaaggtcagtttctgtcaggcctcacttccttcttatcagagggtagccaggtccctgcactggtatctatttagaaatgtacatggagcccccagcgaaatgtgcctacattgtgtgttccagaaccggaggtacccttaccttctagatatgtgatgacatggctctcacgtcaggcagactgctgcacccacgctctcggcctgccgtgcagggatttcactcgtggagtgaggcatctgggggctgtgcagtgaggagctttccatgtgttgttaagacaacctgttagcattgtcttctcccgcgtctcctggcctcttctctctttaaatccttttctctgtttgtcttaatcacattaacgtcctatttatgttttattcaatatacatttaaaatagaacttactatgtgccaggcattgtgttcaacacgtgaaatatttaatccttagaataaccatattgtcaannaaatttacaa

SEQ ID NO: 7863 - DNA, 2871 bp, Homo sapiens
tctagcttcgggaaaagtgtgaggggctcttcacgtggggaaggaacagcaggcgcggaggagggggcaagcgtgtgtgagattcagtggtccatgcgtgcgtttgtcgtgtaagggtcattcctggggtttggagtgggggaacaaatcaatgtggctgtttttccgtggaaagaattcccactgcagtgtcccggagcctgcgtgtggtgggcaagctcctcaaatggtatctcacagggaataggggagtcttgaaaacgcagcttcggcagtaggaacatgaacctcttacctaaaagttccagggagtttggctccgttgactattgggagaagttcttccagcagcgaggaaagaaagctttcgagtggtatggaacctacctggaactgtgcggggtgctacataaatatatcaagcccagggaaaaggtgctggtgattgggtgtggcaactcagaactgagtgagcaactgtatgatgtgggctatcgggatatagtgaacatcgacatcagtgaggttgtcatcaagcaaatgaaggaatgtaatgccacccgacggccccagatgagcttcttgaagatggacatgacgcagatggagtttcctgatgcctcgttccaggtggtgttggacaagggcacctggatgctgtcctgacagatgaggaagagaagaccttacaacaggtggacaggatgctggctgaggttggccgtgtcctgcagggccgggagaccgagtggctctttggcatggatgagggccggaaacagctggcggccagtgctggcttcaggaggttgattacagtggcccttcaccgaggtcagcagtatgaaagcatggaccacatccaagctgagctgtcggctagagtcatggagctggccccagctgggatgcccacccagcagcaggtcccctttctgtctgtgggtggggacattggggtccggaccgttcagcaccaagactgcagccccttgagcggtgactatgtcattgaggatgtgcaaggggatgacaagcgatacttccgtcgactgatcttcctcagcaacaggaatgtggtgcagtccgaagccaggttgctgaaggatgtgtctcacaaagcccagaagaagcggaaaaaggacaggaagaagcagcggcctgctgatgcggaggacctccctgcagccccggggcagtccattgataagagttacctgtgttgtgaacaccacaaagccatgatcgctggccttgccctgctgagaaacccagagctactcctagagatcccactggcattgttggtggtaggcctgggcgggggcagcctccccctctttgtccacgatcattttccaaagtcctgcattgatgctgtggagatcgatccctccatgttggaagtggccacccagtggtttggcttctcccagagtgaccgaatgaaggtccacattgcagatggcctggactatatcgccagcttggcaggaggaggagaagcacggccttgctacgatgtcataatgtttgatgttgacagtaaggacccaacactgggaatgagttgtccgcccccagcatttgtggagcaatcttttctacagaaggttaaaagcatcttgactcctgaaggtgtttttattctcaaccttgtgtgccgagacttggggctaaaagactcagtgctggctgggctcaaggcagtgttccccctcctatatgtccggcgaattgagggtgaagtgaatgagatcctgttctgtcagctgcaccctgagcaaaaacttgccacaccagagctcctagaaacagcccaggctttggagcggaccctgaggaagcctgggaggggttgggatgacacgtatgtcttgtcagatatgctcaagacggtgaaaattgtgtgactgcttaggccaagcagccctcctgcctagactgaccttggactcccagcctgccagagaatgaagaaatacaacgcacagtacttttgaagcttcgtatttttcttggtttcacactcagctacatgtgacctccagcttggtgaggttgcctgaagattagggaaaataaaaatgtccttcccatcttgtcctcttcagtaccacttgggttggtttgtctttgcttcctacaccacgtccttgagtggagttccctgctgaagcccctagcacacactgcatgccttaacaagtgtgtgcaagcccctcagaactcaagacatccaaattttattgcgtctctacttatactggtttgcttttgatttattcctctattagttctataggagtgatctcaagtgagatagcagagcaagatgccaaaagaccataaatagagtaaggtttctatagatgtgagacagatttgagagagcatttactctgtctccctgtgggatgaaactgctggctgaaatggttccaatttttaggaaatctgacccacttcattatttgacagctttccttggtgacccaaaccttgtagcctaagccatttgtctttttctcagtggagggagtgtatggacctggccccatggctttgcatgttagagacctggcagactaaagtctctagtgtttgtttgctcacatttgctgagtgacagctatgtgccagactgcataaagggtggtggcagaagtgaaaatgtttaagaatgaccaaaaacattagtaatgaaagttaatgtgttccaggcattcttctaagtggtttacatgcactgtctcatttaatctgagataaaggatacttaagcccaaactatatctaaacccaaatctcacttggctggaaacatcaatcttaaccatttattcagaaccattaaaccaatgattccaa

SEQ ID NO: 7864 - DNA, 7440 bp, Homo sapiens
  misc_feature (561)..(612): n is a, c, g, or t
  misc_feature (1415)..(1440): n is a, c, g, or t
  misc_feature (1520)..(1540): n is a, c, g, or t
  misc_feature (1585)..(1651): n is a, c, g, or t
  misc_feature (3278)..(3330): n is a, c, g, or t
  misc_feature (4023)..(4032): n is a, c, g, or t
  misc_feature (4794)..(4803): n is a, c, g, or t
  misc_feature (5732)..(5780): n is a, c, g, or t
gctgcgcagcgctggctgctggctggcctcgcggagacgccgaacggacgcggccggcgccggcttgtgggctcgccgcctgcagccatgaccctcgcagcctgtccctcggcctcggcccgggacgtctaaaatcccacacagtcgcgcgcagctgctggagagccggccgctgccccctcgtcgccgcatcacactcccgtcccgggagctgggagcagcgcgggcagccggcgcccccgtgcaaactgggggtgtctgccagagcagccccagccgctgccgctgctacccccgatgctggccatggcctggcggggcgcagggccgagcgtcccgggggcgcccgggggcgtcggtctcagtctggggttgctcctgcagttgctgctgctcctggggccggcgcggggcttcggggacgaggaagagcggcgctgcgaccccatccgcatctccatgtgccagaacctcggctacaacgtgaccaagatgcccaacctggttgggcacgagctgcagacggacgccgagctgcagctgacaactttcacaccgctnnnnnnnnnnnnnnnnnnnnnnnnnnnnnnnnnnnnnnnnnnnnnnnnnnnnctgtttatgtgccaatgtgcacagagaagatcaacatccccattggcccatgcggcggcatgtgtctttcagtcaagagacgctgtgaacccgtcctgaaggaatttggatttgcctggccagagagtctgaactgcagcaaattcccaccacagaacgaccacaaccacatgtgcatggaagggccaggtgatgaagaggtgcccttacctcacaaaacccccatccagcctggggaagagtgtcactctgtgggaaccaattctgatcagtacatctgggtgaaaaggagcctgaactgtgtgctcaagtgtggctatgatgctggcttatacagccgctcagccaaggagttcactgatatctggatggctgtgtgggccagcctgtgtttcatctccactgccttcacagtactgaccttcctgatcgattcttctaggttttcctaccctgagcgccccatcatatttctcagtatgtgctataatatttatagcattgcttatattgtcaggctgactgtaggccgggaaaggatatcctgtgattttgaagaggcagcagaacctgttctcatccaagaaggacttaagaacacaggatgtgcaataattttcttgctgatgtacttttttggaatggccagctccatttggtgggttattctgacactcacttggtttttggcagcaggactcaaatggggtcatgaagccattgaaatgcacagctcttatttccacattgcagcctgggccatccccgcagtgaaaaccattgtcatcttgattatgagactnnnnnnnnnnnnnnnnnnnnnnnnnntgtgctatgttggaaaccaaaatctcgatgccctcaccgggttcgtggtggctcccctctttacttatttggtcattggnnnnnnnnnnnnnnnnnnnnntttggtggccttgttcaaaattcggtcaaatcttcaaaaggatgnnnnnnnnnnnnnnnnnnnnnnnnnnnnnnnnnnnnnnnnnnnnnnnnnnnnnnnnnnnnnnnnnnnacacagttcctgcaacgtgtgtgattgcctgttatttttatgaaatctccaactgggcactttttcggtattctgcagatgattccaacatggctgttgaaatgttgaaaatttttatgtctttgttggtgggcatcacttcaggcatgtggatttggtctgccaaaagtcttcacacgtggcagaagtgttccaacagattggtgaattctggaaaggtaaagagagagaagagaggaaatggttgggtgaagcctggaaaaggcagtgagactgtggtataaggctagtcagcctccatgctttcttcattttgaaggggggaatgccagcattttggaggaaattctactaaaagttttatgcagtgaatctcagtttgaacaaactagcaacaattaagtgacccccgtcaacccactgcctcccaccccgaccccagcatcaaaaaaccaatgattttgctgcagactttggaatgatccaaaatggaaaagccagttagaggctttcaaagctgtgaaaaatcaaaacgttgatcactttagcaggttgcagcttggagcgtggaggtcctgcctagattccaggaagtccagggcgatactgttttcccctgcagggtgggatttgagctgtgagttggtaactagcagggagaaatattaacttttttaaccctttaccattttaaatactaactgggtctttcagatagcaaagcaatctataaacactggaaacgctgggttcagaaaagtgttacaagagttttatagtttggctgatgtaacataaacatcttctgtggtgcgctgtctgctgtttagaactttgtggactgcactcccaagaagtggtgttagaatctttcagtgcctttgtcataaaacagttatttgaacaaacaaaagtactgtactcacacacataaggtatccagtggatttttcttctctgtcttcctctcttaaatttcaacatctctcttcttggctgctgctgttttcttcattttatgttaatgactcaaaaaaggtatttttatagaatttttgtactgcagcatgcttaaagaggggaaaaggaagggtgattcactttctgacaatcacttaattcagaggaaaatgagatttactaagttgacttacctgacggaccccagagacctattgcattgagcagtggggacttaatatattttacttgtgtgattgcatctatgcagacgccagtctggaagagctgaaatgttaagtttcttggcaactttgcattcacacagattagctgtgtaatttttgtgtgtcaattacaattaaaagcacattgttggaccatgacatagtatactcaactgactttaaaactatggtcaacttcaacttgcattctcagaatgatagtgcctttaaaaatttttttattttttaaagcataagaatgttatcagaatctggtctacttaggacaatggagactttttcagttttataaagggaactgaggacagctaatccaactacttggtgcgtaattgtttcctagtaattggcaaaggctccttgtaagatttcactggaggcagtgtggcctggagtatttatatggtgcttaatgaatnnnnnnnnnnnnnnnnnnnnnnnnnnnnnnnnnnnnnnnnnnnnnnnnnnnnncatatgaaatgaactgcaaactctaatagcccaggtcttaattgcctttagcagaggtatccaaagcttttaaaatttatgcatacgttcttcacaagggggtacccccagcagcctctcgaaaattgcacttctcttaaaactgtaactggcctttctcttaccttgccttaggccttctaatcatgagatcttggggacaaattgactatgtcacaggttgctctccttgtaactcatacctgtctgcttcagcaactgctttgcaatgacatttatttattaattcatgccttaaaaaaataggaagggaagcttttttttttctttttttttttttcaatcacactttgtggaaaaacatttccagggactcaaaattccaaaaaggtggtcaaattctggaagtaagcatttcctcttttttaaaaatttggtttgagccttatgcccatagtttgacatttccctttcttctttcctttttgtttttgtgtggttcttgagctctctgacatcaagatgcatgtaaagtcgattgtatgttttggaaggcaaagtcttggcttttgagactgaagttaagtgggcacaggtggcccctgctgctgtgcccagtctgagtaccttggctagactctaggtcaggctccaggcatgagaactgattacccatgatagtgcacattttannnnnnnnnnactccattgcctatgaaatgtaaaatgtgaactccctgtgctgcttgtagacagttcccataactgtccacggccctggagcacgcacccaggggcagagcctgcccttactcacgctctgctctggtgtcttgggagttgtgcagggactctggcccaggcaggggaaggaagaccaggcggtaggggactggtcttgctgttagagtatagaggtttgtaatgcagttttcttcataatgtgtcagtgattgtgtgaccaaggcagcatctagcagaaagccaggcatggagtaggtgatcgatacttgtcaatgactaaataataacaataaaagagcacttgggtgaatctgggcacctgatttctgagttttgagttctggagctagtgttttgacaatgctttgggttttgacatgccttttccacaaatctcttgccttttcagggcaaagtgtatttgatcagaagtggccatttggattagtagccttagcaatgctacagggttataggcctctcctttcacattccagacaatggagagtgtttatggtttcaggaaaagaactttgtggctgaggggtcagttaccagtgaccttcaatcaactccatcacttcttaaatcggtatttgttaaaaaaatcagttattttatttattgagtgccgactgtagtaaagccctgaaatagataatctctgttcttctaactgatctaggatggggacgcacccaggtctgctgaactttactnnnnnnnnnngaaaggagcagggacctctggaattcccatctgtttcactgtctccattccataaatctcttcctgtgtgagccaccacacccagcctgggtctctctacttttaacacatctctcatccctttcccaggattccttccaagtcagttacaggtggttttaacagaaagcatcagctctgcttcgtgacagtctctggagaaatcccttaggaagactatgagagtaggccacaaggacatgggcccacacatctgctttggctttgccggcaattcagggcttggggtattccatgtgacttgtataggtatatttgaggacagcatcttgctagagaaaaggtgagggttgtttttctttctctgaaacctacagtaaatgggtatgattgtagcttcctcagaaatcccttggcctccagagattaaacatggtgcaatggcacctctgtccaacctcctttctggtagattcctttctcctgcttcatataggccaaacctcagggcaagggaacatgggggtagagtggtgctggccagaaccatctgcttgagctacttggttgattcatatcctctttcctttatggagacccatttcctgatctctgagactgttgctgaactggcaacttacttgggcctgaaactggagaaggggtgacatttttttaatttcagagatgctttctgattttcctctcccaggtcactgtctcacctgcactctccaaactcaggttccgggaagcttgtgtgtctagatactgaattgagattctgttcagcaccttttagctctatactctctggctcccctcatcctcatggtcactgaattaaatgcttattgtattgagaaccaagatgggacctgaggacacaaagatgagctcaacagtctcagccctagaggaatagactnnnnnnnnnnnnnnnnnnnnnnnnnnnnnnnnnnnnnnnnnnnnnnnnnaggtgaccacagctgcagttagggaagggagccattgagcacagactttggaaggaaccttttttttgttgtttgtttgtttgtttgtttgtttgtttgtttgagacagggtcttgctctgtcacccaggctggggcgcaatggcacgatcttggctcactgcaacctctgcctcctgggttcaagtgattctcctgccacagcctcctgaggagctgggactacaggtgcgtgctaccacgcccagctacttctgtatttttagtagagacggggtttcactgtgttggccaggctggtctcgaactcctgacctcatgatctgcccgcctcagcctcccaaagtgctgggattacaagtgtgagccaccacacctggcctggaaggaacctcttaaaatcagtttacgtcttgtattttgttctgtgatggaggacactggagagagttgctattccagtcaatcatgtcgagtcactggactctgaaaatcctattggttcctttattttatttgagtttagagttcccttctgggtttgtattatgtctggcaaatgacctgggttatcacttttcctccagggttagatcatagatcttggaaactccttagagagcattttgctcctaccaaggatcagatactggagccccacataatagatttcatttcactctagcctacatagagctttctgttgctgtctcttgccatgcacttgtgcggtgattacacacttgacagtaccaggagacaaatgacttacagatcccccgacatgcctcttccccttggcaagctcagttgccctgatagtagcatgtttctgtttctgatgtaccttttttctcttcttctttgcatcagccaattcccagaatttccccaggcaatttgtagaggacctttttggggtcctatatgagccatgtcctcaaagcttttaaacctccttgctctcctacaatattcagtacatgaccactgtcatcctagaaggcttctgaaaagaggggcaagagccactctgcgccacaaaggttgggtccatcttctctccgaggttgtgaaagttttcaaattgtactaataggctggggccctgacttggctgtgggctttgggaggggtaagctgctttctagatctctcccagtgaggcatggaggtgtttctgaattttgtctacctcacagggatgttgtgaggcttgaaaaggtcaaaaaatgatggccccttgagctctttgtaagaaaggtagatgaaatatcggatgtaatctgaaaaaaagataaaatgtgacttcccctgctctgtgcagcagtcgggctggatgctctgtggcctttcttgggtcctcatgccaccccacagctccaggaaccttgaagccaatctgggggactttcagatgtttgacaaagaggtaccaggcaaacttcctgctacacatgccctgaatgaattgctaaatttcaaaggaaatggaccctgcttttaaggatgtacaaaagtatgtctgcatcgatgtctgtactgtaaatttctaatttatcactgtacaaagaaaaccccttgctatttaattttgtattaaaggaaaataaagttttgtttgttaaaaaaaaaaaaaaaaaaaaaaaaaaaaaaaaaaa

SEQ ID NO: 7865 - DNA, 464 bp, Homo sapiens
atcgtagggtgggtgagtatggagcgtctagcgtaggtgtgtatggagggtctagcctgggtgagtatggagggtctagcctgggtgtgaggcgcgtgcagggtgagtgtgagtggacgcgtgagtgtgtgagtgtgcgcgcttggagcgtgttaggcgagtgcgtgcgcccacccctgcgcccctcctcccgcttacactttgatcttatttgatcggatcgtgaccccagccccgccgggccgacccgaaatgaaaagctctcctcctgcgaagccccctcggggcgctgtgcagcgaggccccttaggcggcggccacgctgtggtccccgaggtcccggagctggccctgcggggcccggcgctcagaagtgatgaattgatcagatagacgaggccgggcttgtccccggccactgattatcgaggcgattctgatctgggcacggccaccggaaaaaa

SEQ ID NO: 7866 - DNA, 942 bp, Homo sapiens
  misc_feature (188)..(217): n is a, c, g, or t
actttgggaggcaagttgggcagatcacaagttcaagagatcgagaccattctggccaacatggtgaaaccccgtctctactaaaaatacaaaaattagctgggcatggcagtgcgtgcctgcaatcccagttggtcatggttcgagaatcaggagaatcgcttgaacctgggaggtggaagttgtannnnnnnnnnnnnnnnnnnnnnnnnnnnnncctggcaacagagctagaatccgtctcaaacaaacaaacaaaaaatcccacagctattggatcatccacagattttttctttacaatcttgttctccttgtccatggaccatcaatagttgacttgccaggtttaattctttcattgcttgagaagaaaggaatcaaaggactgtgtgtagtaagctgacggtaaagttaagattaaattaagacagagagagaatacatatcactgccaggcctgataggaaaaatctgctcttccttttaataacagtgatgaattgtcaggaccttatttaggaaaccctgacctacccataactccctgctaggctaagtagaaaccaggttatttctccctgcttatggctccccgcaaagggacttgcagcgtgtcctgcaactttgtcttcagatagtgcttcctacaaaactaggtcttgttttgtaatcttttctcgtgttgaatcagatctgcttacttatttaggtttggttatgagcttgtatctcactgtatttctcatgctttgttcttttaaacaaatcctttaaactgtgtcattttgtatacacatgtgaggtttgaaaaaaaaaaaaaaaaaaaaaagaactaccttgtgagttttgctcaaaatgtggcctaagtagccattggcatgtctagatgaacaaataaaaataaagataatttctttaaaataaaaaaaaaaaaaaaaa

SEQ ID NO: 7867 - DNA, 1569 bp, Homo sapiens
  misc_feature (5)..(5): n is a, c, g, or t
  misc_feature (25)..(25): n is a, c, g, or t
  misc_feature (145)..(146): n is a, c, g, or t
gtganccgcgctgatttccgtccanatgtccctgaaaaagatgtgcagaaagtccctacctctatgatcgctgataagacttccccaaaaataacaagaaaggagcgccacatactccgcgtcaaagagtgctcccccaggttanncaccagtcttttctccaggcattcagccattcataccctaaaaaagcctggttgtgtgttcctcccgcggttttgtataaaagtttaatccatgttaatctgtgtgaaaattattgcgtgcaacagtattttctcgtgtacctctttttcctatgtgaattgtccctcttttttatttataaatgtctacttttgtttttttaaagacaaaccaatgtgttgtagacctatatgtaacctattccttagtctcatattataggtatgttataagaatggatattttacttggctttagaatgttttacaagaaaactaattcttaactgatcaagtccttgctactaaaatgcttgtgtttttcatcatgacgtcgtgtgcttctaaattaatcattttcgttgtagaaaaatggagtgaatttatattagtcttggaaactaataatagcattgtaaatttatgagatgattttaacagaaaaaatatagaagaatatagttattttaattgtaatattactaactgtagggtgagaaaaaggggggggggtcccattgtggtgaactatgttatagcttgttactcatagtttctttttgatcattttttcggtctccgaggtgaaatgacttattaattaaaatttgtaaactcacatatgcatattgtatatgtgtagaaatgtaatcacactttgtcttggaattacattaaactgtttgaaatcactgtaaaaaaaaaaaaaaaaaacaaaaaccaaaacaacaacaacaccaaaccacaccaaaacactgtcgggggcggccgcctcgcggcccccccggagagaaaaggctctttcgtcaacccccccccgccggggggggcggaggccagcccaaactagtaatgacagcgtggaaacactgctggccacagcgggtggggtccacaagaagaacacctcgggggcaatacaacaactgcggggggaggcgttctccaccccagataaaaaaaccggccgggaggggacacgcagcaccgtcctctgaacacacacaccccaaagggggcggggtcatgggggagcaaccacgaaggggcgcatacaacaaaaggggggtccccagcgggcccgcgctataaaaaaatatgacccccgcgggggcggggggacccacccaagacaaagcccggagcaagggcgccgacgccaaagacgccaggacatggacggaacgtgaacgaagcgggacgccggccgggcgacgcgcgacagaggagaaggccggtcgaggaggcaagcggcgggcgcgctacgcgagcccgagaccgagcaccggaagcccagacgccgagccgaccgacgcgcacgacgcgacgcggacaaccgaagacgaagcacacggcaacgaccacaaacgcccgccgacacaca

SEQ ID NO: 7868 - DNA, 1067 bp, Homo sapiens
ttttattctttaactacgggtccaatccccgtttttaatctctaaataagggcccttcggttcccgccactgttgcagcgtgttcgcataactttttaaaacgtcctttgccgcggtgggcggaccgctccgacagcggacgcacatccctctcgctctctaaggccggttacgcatttgctcatttcaagtgtttctaacgtcagtttagaatacatattgggaaacaatgatctgtagtaggtccattatcttttagtctggtttgtcttcatattttggttatgaaatcttgaattttaaaaacgtaattttaccaatctttcataatgatttgctttttctggtttttgtataggaaatgtcataaaaatagtcctattcagccttccaaaagttacaaaatttttgtttttaacatttagatgtttagtccaactgaaatttgttttcttttatggcatgattttggaatcttgttttaattatttttacatatttatagctgttcctccaagtatcaatttttcaagtgcaacatctgtcatgcagttactatgtaagggccagattctgacctttctgttctttttatctgaaggaaatttgaacatgccacccccaaatataccgatttggcatactgattatttcgagctaaaggtgcttgactaacagtagttgcagaaatggctattttaactgtcctttcctacctgtagcaagccatacaaacttctttgataaagatgctttcctgataccaagatgagaagatggctctaatcagctgagacagcaccagaggaatctacaaacaagaaactattagtttcttaacatatatttaccttccacagtttctgcctctggaggagccttaaactgctttccttcgtcttgtcacacttctctgaaatgtattctttgtggaagatgctatatagtccagagttgtaagccactacttgtgtttaccttttcattgagttttctcctgtgtgatgtacgttgcatatattaataaaattacttgtttttctcttgttaaaaaaaaaaaaaaaaag

SEQ ID NO: 7869 - DNA, 1732 bp, Homo sapiens
  misc_feature (82)..(82): n is a, c, g, or t
tttttttttttttttttaaagggaggtgatccagtcggtaaacgctttgaaaaagaatagctgtcccctgagcgggcattantcgcgtgtgaggtcagggcccatcattgcgcgtgttgggagcgccgcgctggtctatgagcgagcgcctcggcttgtggctgggccgggccggggcggggctgtcttcccgcggagcgtgctgggggcgggtcgcgccgggccgggccgctagtgcgcatgggcgggcgtcctcggctctaactgccgccactttccacacgctgggagggccgttacctcagagatacccgtggccggcatgttggttgaaaaagcttcccggaagggagacgaagagaaaggagaggagcagctcgtgatcatccccggtagcgagtacgcggcgaagtaggcggcggcggagggagcgctgatgaagatggatgtgtcagtgagggccgcgggctgctccgacgacctcagctctggggaggccgacgtagacccaaagctcctggagctcaccgctgacgaggagaagtgccgcagcatccgcaggcagtaccggcagctcatgtactgcgtgcggcagaaccgggaggacatcgtgagctcggcgaacaactccttaaccgaggctctggaggaagccaacgtcctctttgatggcgtgagccgaaccagagaagcagccctcgacgcccggtttcttgttatggcttctgatttgggtaaagaaaaggcaaagcagttaaactcagatatgaacttctttaatcagttagcattttgtgactttctgtttctgttcgtgggtctgaattggatggaaggcgatcctgacaagttgagtgattgtgatgatagcatagctctttccttctggaaggcaatagaaaaggaagcaacatcctggatggtaaaagctgagacattccattttgtttttggttcattcaagctagaacgttctgcaccaaagccccgacttgaacaccagaaaaaagttcgcaagatggaagaaaatggcaacatgcctacaaagttgcagaagttggacctgagtagttatccagaagcgacagaaaaaaacgtagaaaggattttgggattgttgcaaacctactttcgaaagtatcctgatactcctgtgtcctattttgagtttgtgattgatccaaactctttttctcgtactgtggagaatatattttatgtttcttttattgtaagagatggttttgcaagaataaggcttgatgaagacaggctgccaatattagagccgatgaatgttaaccaaatgggtgagggaaatgattccagttgccatggcaggaaacagggagttatatctttgactttacaggagtggaaaaacattgtggcagcttttgaaatttctgaggctatgattacatactcctcatactaaagatttcttagtatagcatcctttttgtgttttttttctgaagttagatggagagtaaaatgtaaactgaagcacatattgtatctcttgtaaagtgaaaaagtattttcaagaacatcagacattgttttactgtgcagcatatttttcttagtaatttataaggtcatgatcttctgttattaaaacaaattcactggcatatttatgggaacgttttattgaatgccctttaagactattaataaaaacaagttttggataccaaaaaaaaaaaaaaaaagggcggccgct

SEQ ID NO: 7870 - DNA, 3116 bp, Homo sapiens
  misc_feature (58)..(58): n is a, c, g, or t
  misc_feature (98)..(99): n is a, c, g, or t
  misc_feature (111)..(111): n is a, c, g, or t
  misc_feature (554)..(573): n is a, c, g, or t
  misc_feature (1487)..(1566): n is a, c, g, or t
  misc_feature (2136)..(2153): n is a, c, g, or t
gagactccagcaggagcccgatggtgctggagccaagtccccgacatgccagaaactntcccccaagtggtgcttcctggacgccaccactgccagcnngcttctacaggntcgaccgagcccaggagcacctcaactatgtgactgagatcgcacaggatgagatttatatcctggaccctgagctgctgggggcatcggcccggcctgacctcccaacccccacttcccctctccccacctcaccctgctcacccacgccccggtgagtcctggtgtcccgtccctccagcccctggctttcagccccacctgtaagccgatgacttctgaatccctgcttctagcccctccaccaattaactaaatggtgtcaacctgaacctggccaaagcccacctgacggccttcagccctgtggttctgtggggaagcggcctcacgtccaccctggttccctccctgacttctccctcctctggacctcatccttcagccagtcctggcagcccccggacccaccacctgagcactcctccccacccctactgccnnnnnnnnnnnnnnnnnnnnccacgccctggcccccagctcttatatccctgtggccattcgtgccctcgaacccccatctccataccacggtcaactaaaaatgcagagcataccaggccactccccaacctagaagcttctttctcagcagccctttggacgtggattctccccaggccccccgtcattgcactgggctcccagccccctccctgagttcacctccatggtcctgccccactctcttctcttggttctttgaggcatcaggtgtttgccaccactggacttctgtcatcgctgcctccaactcttcccccatctttccggagctcccccacccccatccccttcgaatctcagcttggctgtttcctccttggagagatcactcccaggaccccctctgcaggggtgccacatcacctgttctgaattcttaagagcacccctgctctcagaactccttatttatttgacttgtttgtatccctgaactagaatgtaagctccatgagggcaaggccttcctctgtctcgtttccctgctgtatccccagtgcctggaatagtgcttggtgtgtagcaggcactcaataaactgtggaaaggatgaagatgcccccagttggggttggggagggcgaccagctggcctgtgccgtagccggtcacagcacatcatgctctgttgcaggtcactgcaaggggatgctgcaccccctcaaggtgaggcctctccctctggggcccctcctttctgcctggttgggggcaggaggctcagtggggtggggatagggcccagacacagccttacacaaacacagcctttgagcttcacgcaccaacggagccctgggcacacatgcctggccggcacagtcctgtccactgaggcaccaacccaagcccaggcctccgactgcagnnnnnnnnnnnnnnnnnnnnnnnnnnnnnnnnnnnnnnnnnnnnnnnnnnnnnnnnnnnnnnnnnnnnnnnnnnnnnnnncttctgtaaggtactagctccaggctccagttccttcccccagcagctccctcgggccctggggagcgaggcctctgggttgggccaagagctgacctgctcaggtgctgtcatctgtcatcgtctggccctctgtgggatctccagtgatcgtcccattccacttcactgtatctctgtctaggccacaatagatggctcctagtaggggcttcctagctcagtccacctgtccctggtgcttagaaaggagcaggtcagaggaagcactgctccagggcttggtcaccagtgctgccagagagcccacaggctgtggggtgagaggcccctcctccggtgtgctccagagagacccacagaggcaactcaggagtaagatgtgtgagcgcactcgtttcaggcctgtgctggtgtacccggctgtgggccagcgtgtgagctcagggaaggaggggtggccccaggaggtccagccctgccatgcctcctgccctcagctccaggagctgcaccgagctgggggcgacctcatgcaccgagacgagcagagtcgcacgctcctgcacnnnnnnnnnnnnnnnnnnagcaaggatgtggtccgctacctgctggaccacgcccccccagagatccttgatgcggtggaggaaaacggggagacctgtttgcaccaagcagcggccctgggccagcgcaccatctgccactacatcgtggaggccggggcctcgctcatgaagacagaccagcagggcgacactccccggcagcgggctgagaaggctcaggacaccgagctggccgcctacctggagaaccggcagcactaccagatgatccagcgggaggaccaggagacggctgtgtagcgggccgcccacgggcagcaggagggacaatgcggccaggggacgagcgccttccttgcccacctcactgccacattccagtgggacggccacggggggacctaggccccagggaaagagccccatgccgccccctaaggagccgcccagacctagggctggactcaggagctgggggggcctcacctgttcccctgaggaccccgccggacccggaggctcacagggaacaagacacggctgggttggatatgcctttgccggggttctggggcagggcgctccctggccgcagcagatgccctcccaggagtggaggggctggagagggggaggccttcgggaagaggcttcctgggccccctggtcttcggccgggtccccagcccccgctcctgccccaccccacctcctccgggcttcctcccggaaactcagcgcctgctgcacttgcctgccctgccttgcttggcacccgctccggcgaccctccccgctcccctgtcatttcatcgcggactgtgcggcctgggggtggggggcgggactctcacggtgacatgtttacagctgggtgtgactcagtaaagtggatttttttttcataatatttttattaactttttttttcccttttttttatttgtttttatttacaaaccaccggggtttccgggc

SEQ ID NO: 7871 - DNA, 897 bp, Homo sapiens
  misc_feature (555)..(596): n is a, c, g, or t
tttttttttttttttcctgagacaaaagctacatgacacaagatggcagacattctacgagatataagaacagctcataatggcttttgctttaatatgacatgaaaagcttggggttgtagttatcaataaactcaacctgagtgagcagtggatgtgatgtgggtgccaaaaaaaaataagcattaccttgattgcattgaagagatctaacattcggattaagggaggtaaagacctactgttccctgtcctactaagaccacatatggactattcctttcctttctaagcaccaccttttaagagaaaagagccagaaaggcaattagcatggcatggccttaagtggaagtgagagcccttccacaccctcagagggtgacgatgcagctgatgaagtgccgctctgaaaacaatctggatggtggcagtgggaaggagagatgcaaaggaaaagaggaaactctgtagaactagttcagaaatcatcaggagggtaaggaaagcagaaaacctattgtacagttgacccttgaacaacatgggaattannnnnnnnnnnnnnnnnnnnnnnnnnnnnnnnnnnnnnnnnnaatctccaaaatcttacctactaataggctattgttgaccagaagccttattgataacagaaaaggtcaattaacacatattctgtatatgtattatattcttacaattaaggtaagctagggaaaagaaaatattaagaaaatcataaggaagagaaaatgtttttacactactgtactttacttattgatattgtaagttacattgtctgcttaaagctgaatcatctgtcgaaatgtggcaacaccggttatccatccgggactctaagtcacgcagctgcagtggacggcgcgttcc

SEQ ID NO: 7872 - DNA, 1206 bp, Homo sapiens
gcagtggtgcaatcttggctcactgctacctctgccttgggggttcaagtgattctcctgcctcagcctcccgagtagctgggattacaggcacccgccaccgcgcccggctaatttttgtatttttagtagagacggggctttgccatgttgaccaggctggactcaaactcctgacctcaggtgatccgcccacctcggcctcccaaagcactgggattacaggaatgagccactgcactcggcctacttctgcattccttagagtacatcctagctaggatatattcacttgtctttagagctaacagcagaagaaaggtacctagatgcttatctagctctttatctttctagaaattctagaagatgagaggggcagtggtggctccaagggagtgattttaggatggactgggacagagaggggctgcttacacatactcacacagaggccattaatttagggagttcaaggtccaggaggttgacggcatctaggcctgtggcagagtgcactcctgctttggggaatgtatgggcagcttcttgcctgtagttggagggttagagagagggatcaataatttcatggttggacttgagtttggagcgagtggagttagatacaaattctatgtttttggagaaagtatttgatcttcttggctgtgaggcaaagcgaggtttaaaaatatttttcacttaaaaatatatatatatgcatgtatatttaatactgtctatggattgtgccaatatctatttcatggttttgatattgtgtagttatacaaggagttaccactgaacgaaactgggggaagggtacacagaatctctgtactttttttgttgttgttgcaatttcctgtaaatctatgattattttaaaataaaaaagttaaagcatacgtatttacatttgattaaatgcagtgtgatatcctgggttggattttggaacaaaacaaggcatgagtgaaaaaactggtaaaatccaaaaaagcctttagttaaaagtaataccagtgttaatttcttagttttgacaaatgtgccatggctgtgtaagatgcaaatgttagaggaaactgggcgaagaatttgagggaactctctgtactattctttgcagcttttctgtaaatctacaattattccaaaataaaagtctattaaaaatgtaaaaaaaaaaaaaaaaaa

SEQ ID NO: 7873 - DNA, 1626 bp, Homo sapiens
  misc_feature (660)..(678): n is a, c, g, or t
aacattcctgcaaatggtttcaatatatgcagatgtctcgatataggaatgaaattacgtctttggaacaacttaaataagtcaaatatacttggagctttaaaaattaaaaggagagagattcgagcaccttttctgctgccatgacaaccatgcaaggaatggaacaggccatgccaggggctggccctggtgtgccccagctgggaaacatggctgtcatacattcacatctgtggaaaggattgcaagagaagttcttgaagggagaacccaaagtccttggggttgtgcagattctgactgccctgatgagccttagcatgggaataacaatgatgtgtatggcatctaatacttatggaagtaaccctatttccgtgtatatcgggtacacaatttgggggtcagtaatgtttattatttcaggatccttgtcaattgcagcaggaattagaactacaaaaggcctggtccgaggtagtctaggaatgaatatcaccagctctgtactggctgcatcagggatcttaatcaacacatttagcttggcgttttattcattccatcacccttactgtaactactatggcaactcaaataattgtcatgggactatgtccatcttaatgggtctggatggcatggtgctcctcttannnnnnnnnnnnnnnnnnnttgctgtgtccctctctgcctttggatgtaaagtgctctgttgtacccctggtggggttgtgttaattctgccatcacattctcacatggcagaaacagcatctcccacaccacttaatgaggtttgaggccaccaaaagatcaacagacaaatgctccagaaatctatgctgactgtgacacaagagcctcacatgagaaattaccagtatccaacttcgatactgatagacttgttgatattattattatatgtaatccaattatgaactgtgtgtgtatagagagataataaattcaaaattatgttctcatttttttccctggaactcaataactcatttcactggctctttatcgagagtactagaagttaaattaataaataatgcatttaatgaggcaacagcacttgaaagtttttcattcatcataagaactttatataaaggcattacattggcaaataaggtttggaagcagaagagcaaaaaaaagatattgttaaaatgaggcctccatgcaaaacacatacttccctcccatttatttaactttttttttctcctacctatggggaccaaagtgctttttccttcaggaagtggagatgcatggccatctccccctccctttttccttctcctgcttttctttccccatagaaagtaccttgaagtagcacagtccgtccttgcatgtgcacgagctatcatttgagtaaaagtatacatggagtaaaaatcatattaagcatcagattcaacttatattttctatttcatcttcttcctttcccttctcccaccttctactgggcataattatatcttaatcatatatggaaatgtgcaacatatggtatttgttaaatacgtttgtttttattgcagagcaaaaataaatcaaattagaagcaataaaaaaaaaaaaaaaaaaaaaaaaaaa

SEQ ID NO: 7874 - DNA, 887 bp, Homo sapiens
agtcggttctaccatacttgaataataatagcactcatattctaaaacacttgcttcttatgagtaggaagaatgggtcactgcttcagaatcccagacatgtccaggaggaggtgaaaaccaaatgagcagatcatacccagcctgattgaaacacacacaatatagtcagccctttgtctctatgtattcaccaactcttcaagtacacctatgtatagcatgctgacaaactctgtcttcttcaatctgctaaatcattttccactttcctacattgctgtgggccaggagagccctgggtgtagtggaaagtggggagtgattaaatccatctaggaaggagatgggtgggtgaaaaaaagtgtgtaacatatacaaaggtttctatgattacaagcctactatgaaatccagtcacacctaccactcacagtcccacttactttgctctaagccacactgaactctatctccaaacatgctgtgcatagtatttcccttacacggcacacctgcaaatttattctgcactttcaaatataacttaaaacaatagcactacatgaaatgtgccattttcccaagaagattgtagactctttcccctgtactcgccataccttacacaattctccctttctgcaaataccaaattatgtttcttggtatagtgatcttcccatgggcctacaaaatccatgtggtcaaatgacatgcctttccgttattccttccctaggaatcttctcctatgcctgacatccatgtttaatgaatgatcagacacaatataggaagagggatgctgacttttatgtttatgcctctattctcaggatctgaaacagcacctgatatttaacaggtgttcactatgtgtctgt

SEQ ID NO: 7875 - DNA, 2430 bp, Homo sapiens
agcagcgaggcctggagccgccaggagaggggcggggggcggcccttctccaggaatttccggggatcgtgttacagcgttggcggagcccgagcggagtgggactcgaggccctgtagccggactgggcccctcgccccctcctccagcggcctgcgggccttggcagcgccgcccctgcccacactgaccccgtgtggcggggccgctccgcgcccccgggccgctctgtaatggtagggcagcctcagccccgagatgacgtcgggtctccgcggccccgggttattgtaggaaccatccggccccgcgtaatcgtaggaactatccggccccgcgtaatcgtagggtctgcgcgggcccggcccccaccagacgggactccccgcccccaattggcggccgaagagtctcctcgccccagagtcatcttcgggacgcccagggcccgggtgattttgggctcgccgcggccccagatgctgcgcagcagtctccgattccccatcaccaattcggctggcgtctccgagaccgcggactcccgtagggtccccgtggccccgagttgtagtcgggacaccccggccgcgggtgatcgtcgggtctccacgcgcccgggtcgctgacgcggatccggcctcggcgccttctcagggcgccctgcaaggccgcaggcaggatgaacattctggcacccgtgcggagggatcgcgtcctggcggagctgccccagtgcctgaggaaggaggccgctttgcacgggcacaaagacttccacccccgcgtcacctgcgcctgccaggagcaccggacaggcaccgtgggatttaagatctccaaggtcattgtggtgggggacctgtcggtggggaagacttgcctcattaataggttctgcaaagacacctttgataagaatcacaagggccaccattggagtggacttcgagatggaacgatttgaggtgctgggcattcccttcagtttgcagctttgggataccgctgggcaggagaggttcaaatgcattgcatcaacctactatagaggagctcaagccatcatcattgtcttcaacctgaatgatgtggcatctctggaacataccaagcagtggctggccgatgccctgaaggagaatgacccttccagtgtgcttctcttccttgtaggttccaagaaggatctgagtacccctgctcagtatgcgctgatggagaaagacgccctccaggtggcccaggagatgaaggctgagtactgggcagtctcatctctcactggtgagaatgtccgagaattcttcttccgtgtggcagcactgacctttgaggccaatgtgctggctgagctggagaaatcgggggctcgacgcattggggatgttgtccgcatcaacagtgatgacagcaacctctacctaactgccagcaagaagaagcccacatgttgcccatgagggctgaggagactgttcagagactgcccagccctagggcactgtgccaccctcattcctccagagcttgacccctggacatttgcactgactttatccagaccaaagagctgcctcttggtggcagtattcccacagaggggtagctgggatcatgctagtcacttcctgcccccaggcaccgtgccaaagactggatgccccctactcctcaggggactgtccagggcgcccagtggtagtgagggagagtgtctctgttcttttgctcagcctgctgggccctttgtgtttgaggatgcttaatgattccagcctctcactgtgccttatgcattaaaatttctttgttacgagcaaaaaaaaaaaaaaaaaaaaaaaaaattaaaccccccactaatccacctctccaccaccccccctctccctctcctttccctcacctctacctcccccactctccccccacaccctccctagctatctatatcttcctacctctcactctctaatccaacaaagggggcgcgccccccataaaaacccccccggggggggccctatattctccggacaccccttttttcttataaaaaaggggccccttcaaagggggccttttataaaacactgcggggggccccccgccctttatacacgccttgcaggtggagaaaaaactgccaccctggggatatttcttgtaagagcacacttcatctctagcggggaatcaccacctgcgccgactctccttcccctacttatcgaccccgccggcgacccatacaacctttccacatgcatctggaggaactactcacgcgcgccgattcgcccccttgtaaaagatattctctctctcacgccaaatctccataccacatcatcctatacgccctactgcgcacccgccactacgccgatcattaacagacagtatcccctgtgtacgcgaatttcatct

SEQ ID NO: 7876 - DNA, 4845 bp, Homo sapiens; identical to SEQ ID NO: 5884
  misc_feature (3995)..(4039): n is a, c, g, or t
  misc_feature (4514)..(4615): n is a, c, g, or t

SEQ ID NO: 7877 - DNA, 683 bp, Homo sapiens
ttttttttttttttttttttaacgaaacacaatttaaattaaaataaaaacactttctccacccgccccatgccagaaggctctggcccaagcctcctcttaaaaaaaaaaattttctgctagaaatactgtgcattacttttttctttcacttctcttgaaggttaaaacaagatgtatttccccaggagttacagatatgttctggtgcatagagagacagcagctcgggatccgggccagcccccacccgactgagcacaggactcacccccctccccccacccccggttgagcatagtaggacagcaggcctggacacagcacgggtgacgtccctggcttcgacctccaaggaacgccggtagcagggtcgggggcaagcggggagggggcaggcaggggccgggcccctcctggcgagcgactcatgctgtgactcgcgactgagggcggaccccggctggggaaagaaggggcttcctccaaggttttcttttctaatcaccaagcataataattataaatacttcgaaaataagaccgatttcaaaacggggaggggaagttaaaaaaggcaaggaaagggacggcagcgcggtccctctaggctggcagggcgaaggtgggaacggagaaccacgttcaacgtatgtacaagcggacgcttggaaacgaagtta

SEQ ID NO: 7878 - DNA, 5250 bp, Homo sapiens
gcctctgctgccagcccccagtgggagctcagccccaccgcaccccgccaagatgcccagtggcaccgagcagcaaacagaagggacttccgttaccttctctcctcttaagtcaccgccacagctggaacgagagatggcctctccacctgagtgcagcgagatgccccttgatctgtcctccaagtccaaccgccagaagcttccattgccgaaccagcgcaagacaccccccatgcctgtgttgacccccgtgcacaccagcagcaaggccctcctctccacagtcctgtctaggtctcagcgcacaacccaggctgccggtggcaatgtcacctcctgcctgggctccacttcctcgccctttgtcatctttcccgagatcgtgaggaatggggacccgagcacctgggtgaagaactcaactgcactgatcagcaccattcctggcacctacgtgggagtggccaacccagtgcctgcatccctgctgctgaacaaagaccccaacctgggcctcaaccgtgacccccgccatctccccaagcaggagcccatctccatcattgatcaaggagagcctaagggcactggtgccacgtgtggcaaaaagggcagccaggctggtgctgagggacagccaagcacagtgaaacgatatactccagcccgcattgcccctgggctgccagggtgccaaaccaaggaactctctttgtggaaacccacggggccggcaaatatttatccccggtgttcagtcaatgggaaacctaccagcacccaggtcctgcctgttggctggtccccgtaccaccaggcgtctctgctttccattggcatttccagtgccgggcagctgacccccagtcagggggcgcccatcaggcccaccagcgttgtttcggagttttctggtgtgccatctctcagctccagcgaagccgtgcacggacttcctgaggggcaaccacggcctgggggctccttcgttccagagcaggaccctgttacaaagaacaaaacttgccggattgctgccaagccttatgaagaacaagtcaatcctgtcctcttgaccctcagccctcagactgggaccctggcactgtctgttcagcctagcggtggggacattcgaatgaatcaggggcctgaggaatcagagagccacctctgctctgacagcactcctaagatggaaggcccccagggggcttgtggcctgaagctggcaggagacacgaagcctaagaaccaagtgctggccacctacatgtcccatgagctggtcctggccaccccccagaacctgcctaagatgcctgagctgcctttgctacctcacgacagccaccccaaggaacttatattggacgtggttccgagcagcaggaggggctccagcacagagcgcccacagcttggaagccaggtggatctggggcgagtgaaaatggagaaggtggatggtgatgtggtcttcaatttagccacctgcttccgggctgatggcctcccagtggctccccagaggggccaagctgaagttcgggctaaggccgggcaggctcgagtgaaacaggaaagcgtaggggtctttgcttgcaagaacaagtggcagccagatgatgtgacggaatctctgccgcccaagaagatgaagtgcggcaaagagaaggacagtgaagagcagcagctccagccacaagccaaggccgtggtccggagttcccacagacccaagtgccggaagctgcccagtgacccccaggaatccaccaagaaaagccccaggggggcttcagattcaggaaaagagcacaatggagtcaggggaaagcacaagcaccggaagccgacaaagccggagtcccagtctccaggaaaacgagccgacagccacgaggaaggttccttggaaaagaaagcaaagagcagtttccgtgactttattcctgtggttctgagcacccgcacgcgcagtcagtctgatttaaaggcccgtaagcagaagacttcctcctcccaaagtttggagcaccgcctcaggaacaggaaccttctcttgcccaacaaagtccaggggatctcggattcaccaaacggtttcctcccaaataacctggaagagccagcctgccttgaaaattcagaaaagccatcaggaaaacgaaagtgcaagaccaagcacatggcaaccgtctcagaagaggcaaagggcaaaggtcgttggagccagcagaagacacgatctcccaaatctaccaccccagtgaaacccacagaaccatgtacaccctctaagtcccgaagtgccagctcagaggaggcctcagagtcacctacagcccggcagatccccccagaggcacgtcggctcatagtgaacaaaaatgctggtgagaccctcctgcagagggcggcgcgtcttggctataaggatgttgttctctactgcctccagaaagacagtgaagatgtgaatcaccgtgacaatgctggctacacagccctgcatgaggcttgttcccggggctggaccgacatcctgaacatcctgctggagcacggggccaacgtgaactgcagtgcgcaggacggcacgaggccagttcatgatgcggtggtcaatgacaacctggagaccatctggctcctgctgtcctatggggccgatcccacactggctacctactcgggtcagacagccatgaagctggccagcagcgacaccatgaagcgctttctcagtgatcacctctcggatcttcagggccgggcagagggtgatcccggtgtatcctgggatttttacagcagttctgtgttggaggaaaaagacgggtttgcctgtgacctcctacataatcctcctgggagctcagatcaagaaggagacgatccgatggaggaggatgatttcatgtttgaactctcagacaagcctcttctcccttgctacaacctccaagtgtcagtgtcccgcgggccctgcaactggttcctcttttccgatgtcttgaagaggctgaagctttcctcgaggatctttcaggcccggttcccgcactttgaaatcaccaccatgcccaaggccgagttctacaggcaggtggcctccagtcagctgctgacccctgccgagaggcctggaggcttggacgacagatcccccccaggctcctctgagactgtggagctggtgcggtacgagccagacctacttcggctcctagggtccgaggtggaattccagtcttgcaacagttgaccgggaaaacagcccctcctcttctttctccttccgagttcgcccttcccccacctccttgtctttccccgaccgagcaccagactgcagaatgaggcaataatacggaccaacaagaagccgccttatcaatgccagcattagcgactggactgtttttgtttttttggttacaattagttctcatctccctgtcgtcgtcattgttatcgtggttgctgatgggggtggaaagttgaactccatgtctgaggacaagaggtcccgggggtggtgggaggtggcgccggggtcccttggactggcctccttgttcatgaccaagaccaaacctgggccctggatggccttggcctgtcccgaggagaaatgagaaaatcccagatctctgagcgccccccaactccattcccctgtgttcttctgtcttctgtagtatttattttattagtatttaatttgtattgtttcattggtttctgataagtctgtatcactgtgacgatttgagacaacttgttgtattgagggactttctgtacctccttttctttttctttgttgatgagctctgacaaagctattccctggtgtttttttcccccactggggagggggtgaggtggaatggggtgggggaacatggacttgtgactaacgaagctggttgctgctggcccagggctgggggcttgggggtaaatcctgaggctttggtgctcccccacccacccattcccgccctttgcagcagccccgctatcttgagattagtgttgacagggaggggaggattgtgaggtgaggggttaataagttactctaataaaggagcgtggagaagggatctgaggggtgagggtggcccccctcctcacgccttcttcactgcccccctcagagtgcacaatacgagtttgttcctgcctccactctcccaccccgttctggcctccctgtctcaagatactgagcctctcacctcccagccctcagccacccccatccctgccccttctgagactcacagcacccctttccttcctctcctcccacctcctccctcagcccctcattctccttgggaatctgcagagggctctgggactcactgccggatgtgaaatccaggcgtcagctgtttgctaggcaagggcaggaaagtggtctccagcccttgctccactcatgcctgggggcctggggctgagtggtatccctacctggcctccccctggcctctgggcctccagcgctgggtttgtcgagtgagagagagagaggagcttgggttgcttccctgtccccgccccctctgtggcattgtccctcccactcttatttttctaccaattgctatttttccgaacaatccttgtagagtatgtaccatccaaaggcaggagggcctcgccgtggccggctctggttggagatggtacagttttattgtacaggtgctaaaacaacaacaacaaaaaagaaaatggaaaaaaaaaagattaaaaaaaaaaggaaaaaaaaaaagccagtttgaggatgggacaatctgttctctagaggctcctgagccatgcgggagcattggtggttattttctttgtattgtgtttgttctttgttcctgggggggaagttctcggcccccttctgtaggactgctccccacccccaccatactgcccagttggttttgaacagttgttttccctttttaagaaaaaaaaatacatatatatatacatatatatatataaagttgaggggttttggactttaatttgttggttttgttggggttcctggtattgtgtagtttatttcatgttctgtttgcctttccttttttcgcatttgggtgtatattctggctgccctttatgtttcattttaagcaactggctgtggagtcaaaaacacttgcatactgaaaaaaatgtgtaagggaaaaaaaaaaaaaaaaaaaaaaaccgcgg

SEQ ID NO: 7879 - DNA, 563 bp, Homo sapiens
  misc_feature (144)..(169): n is a, c, g, or t
tctggtcatgattgtggtgaattttataactctgcttttgctttaatcatttgaagccacttagcatcacagaggttcatggctattatgctgtatcttctttatgtgtttttatttacttttattaaatacacagtatcttcnnnnnnnnnnnnnnnnnnnnnnnnnnaattctagtttgcatacagtaataatgccatatctacatttcttttgttagccaagacctattttattttcctgtttatttcaaccattggtgtttaattttagattgtcttctataacagcattaagtggattttttaactgactctgataatgtcctttattattaccacttttaaattattcctgccatattattgacattttaattacaaattgttattgaatataggctgggcgcagtgacacacgcctgtaatcccagctactcaggagactgaggcacaaatattgcttgaactgggaggcagaggctgcagcaagtggagatcgagcccctgcatgcagcctgggtgacagtgagactgtctcaaaaaaaaaaaaaaaaaaaaaaa

SEQ ID NO: 7880 - DNA, 2035 bp, Homo sapiens
agcgggcaaggacacacccacagcttattacaccattggctgctgtttagctcccttatataacactgtcttggggtttaaacgtaactgaaaatccacaagacagaatagccagatctcagaggagcctggctaagcaaaaccctgcagaacggctgcctaatttacagcaaccatgagtacaaatggtgatgatcatcaggtcaaggatagtctggagcaattgagatgtcactttacatgggagttatccattgatgacgatgaaatgcctgatttagaaaacagagtcttggatcagattgaattcctagacaccaaatacagtgtgggaatacacaacctactagcctatgtgaaacacctgaaaggccagaatgaggaagccctgaagagcttaaaagaagctgaaaacttaatgcaggaagaacatgacaaccaagcaaatgtgaggagtctggtgacctggggcaactttgcctggatgtattaccacatgggcagactggcagaagcccagacttacctggacaaggtggagaacatttgcaagaagctttcaaatcccttccgctatagaatggagtgtccagaaatagactgtgaggaaggatgggccttgctgaagtgtggaggaaagaattatgaacgggccaaggcctgctttgaaaaggtgcttgaagtggaccctgaaaaccctgaatccagcgctgggtatgcgatctctgcctatcgcctggatggctttaaattagccacaaaaaatcacaagccattttctttgcttcccctaaggcaggctgtccgcttaaatccagacaatggatatattaaggttctccttgccctgaagcttcaggatgaaggacaggaagctgaaggagaaaagtacattgaagaagctctagccaacatgtcctcacagacctatgtctttcgatatgcagccaagttttaccgaagaaaaggctctgtggataaagctcttgagttattaaaaaaggccttgcaggaaacacccacttctgtcttactgcatcaccagatagggctttgctacaaggcacaaatgatccaaatcaaggaggctacaaaagggcagcctagagggcagaacagagaaaagctagacaaaatgataagatcagccatatttcattttgaatctgcagtggaaaaaaagcccacatttgaggtggctcatctagacctggcaagaatgtatatagaagcaggcaatcacagaaaagctgaagagaattttcaaaaattgttatgcatgaaaccagtggtagaagaaacaatgcaagacatacatttccactatggtcggtttcaggaatttcaaaagaaatctgacgtcaatgcaattatccattatttaaaagctataaaaatagaacaggcatcattaacaagggataaaagtatcaattctttgaagaaattggttttaaggaaacttcggagaaaggcattagatctggaaagcttgagcctccttgggttcgtctacaaattggaaggaaatatgaatgaagccctggagtactatgagcgggccctgagactggctgctgactttgagaactctgtgagacaaggtccttaggcacccagatatcagccactttcacatttcatttcattttatgctaacatttactaatcatcttttctgcttactgttttcagaaacattataattcactgtaatgatgtaattcttgaataataaatctgacaaaatattagttgtgttcaacaattagtgaaacagaatgtgtgtatgcatgtaagaaagagaaatcatttgtatgagtgctatgtagtagagaaaaaatgttagttaactttgtaggaaataaaacattggacttacactaaaaaaaaaaaaaaaaaaaaaaaaaaaaagggggggaaatccgggggcaggtaggggcccttttggagggggccatagggggggttttttaaaggggggggccgccccaaaaaaacccccggggggccccaatttttgcgggcacccgtt

SEQ ID NO: 7881 - DNA, 4920 bp, Homo sapiens
  misc_feature (4851)..(4885): n is a, c, g, or t
aaaatcctgcgggagagggggtggggcaaccctctggaggcagcgcgcccgcgggcagcctcgttgtggctccttgggctctgttggcggcggcgctagcttcggagtctcccgcgcgcacctcagccgcctcctagcggcgcggcgctcgctcctacgcctaaaatgaccaatgtgtgatttcagtggaataaatggcgtccaaagtcacagatgctatagtctggtatcaaaagaagattggagcatatgatcaacaaatatgggaaaaatctgttgaacagagagaaatcaaggggctaaggaataaaccaaagaaaacagcacatgtgaaaccagacctcatagatgttgatcttgtaagagggtctgcatttgcaaaggcaaagcctgaaagtccttggacttctctgaccagaaagggaattgttcgagttgtatttttcccctttttcttccggtggtggttacaagtaacatcaaaggtcatctttttctggcttcttgtcctttatcttcttcaagttgctgcaatagtattattctgctccacttctagcccacacagcatacctctgacagaggtgattgggccgatatggctgatgctgctcctgggaactgtgcattgccagattgtttccacaagaacacccaaacctcctctaagtacagggggtaaaagaagaaggaaattaagaaaagcagcccatttggaagtacatagggaaggagatggttctagtaccacagataacacacaagagggagcagttcagaaccacggtacaagcacctctcacagcgttggcactgtcttcagagatctctggcatgctgctttctttttatcaggatcaaagaaagcaaagaattcaattgataaatcaactgaaactgacaatggctatgtatcccttgatgggaagaagactgttaaaagcggtgaagatggaatacaaaaccatgaacctcagtgtgaaactattcgaccagaagagacagcctggaacacaggaacactgaggaatggtcctagcaaagatacccaaaggacaataacaaatgtctctgatgaagtctccagtgaggaaggtcctgaaacaggatactcattacgtcgtcatgtggacaggacttctgaaggtgttcttcggaatagaaagtcacaccattataagaaacattaccctaatgaggacgcccctaaatcgggtactagttgcagctctcgctgttcaagttccagacaggattctgagagtgcaaggccagaatctgaaacagaagatgtgttatgggaagacttgttacattgtgcagaatgccattcatcttgtaccagtgagacagatgtggaaaatcatcagattaatccatgtgtgaaaaaagaatatagagatgacccttttcatcagagtcatttgccctggctccatagttcccacccaggattagaaaaaataagtgctatagtatgggaaggtaatgattgtaagaaagcagacatgtctgtacttgaaatcagtggaatgataatgaacagagtgaacagccatataccaggaataggataccagatttttggaaatgcagtctctctcatactgggtttaactccatttgttttccgactttctcaagctacagacttggaacaactcacagcacattctgcttcagaactttatgtgattgcatttggttctaatgaagatgtcatagttctttctatggttataataagttttgtggttcgcgtgtctcttgtgtggattttcttttttttgctctgtgtagcagaaagaacttataaacagcgattactttttgcaaaactctttggacatttaacatctgcaaggagggctcgaaaatctgaggttcctcatttccggttgaagaaagtacagaatataaaaatgtggctatctctccgttcctatcttaagcgtcgaggtcctcagcgatcagttgatgtaatagtttcatctgctttcttattgactatctcagttgtatttatctgttgtgcccagataaacctctacttgaaaatggagaaaaaacctaacaaaaaggaggaactgacactagtgaataatgttttaaaactggctactaaactgctaaaggagttggacagtccttttagattatatgggcttacaatgaatccgctgctttataacatcacccaggttgttatcctgtcagctgtttctggtgttatcagtgacttgcttggatttaatttaaagctatggaagattaagtcatgacaattcaaagaaaagaagatgtagcctcttttccagaataagagtactgactaagctgcctgaaagcttgtcactgattctttgcttcaggagtctcagctagggagttgaagtgtttacatcagactgtcttgtgcaattcttatatttattttactggttcacttttttttacatttattttagtctttatatttttatttttaagcattgatgtacttagttgttgaaagggtgatgaaactgatatccagatacttgagatcctggtaattggtcataaataattggcaaaataacaaattgtgaaaatagaagccattgctcagcaccgtttctccatcaatgccgtgaacttgccttacttgaggaaaaattctttaactttggaatattgcattgaactcagctatacacataaaacattttctttggtaaatcaagatccagtcagggtttctcttgaattattttggaacaatgccaggatccaaactgattaagttacagtttaagcacccttcagtattaatatatacggtattatataacaggtcaacaagtgctctttgatgataaaacttgtaatagagcaataattgtaaatggttaccatactgtaagatattttgataaaaattaactagtaatacttgtatttatttgaaacactgggctgtttgcacagctccaactgtgcatgctcaaaatgtgcactttttaaaattgttacttttaatgcgtatctttatatgggatctgttatagtatactagggcatgatatggtatccttttgagtgaggtatatactcatctcacaagtgaagtgcctactgatattactaaagtacattatgtttactcaagtaaataattttctccccatggtacactctagtgtaggctattcataccacactgaaatgaacaactgaagaataaggctaagaaccaataaaatatttctctaattgctagttgtaaaactgtatccaaattttcagaaaagacagcttcagcttgcaaattctatcctctaaacttatctggtgcattctccccaccccacccccattatataagggctattttagatgcttttaacctccccaacaaataatttgccaagtgtccaatgagaacttatcatgttggtgtgttaggtaaatcgggcaaatatgatagtgtcttacattgggccttgattttaagttgttatatttgtacaatcgagtattttagaaattacatgaaacatgaaacagtttttgcaattttttttaaactgggcatctggtttctaaaaatttatttgaaacaatctagaattttcttggtgcaaagtgtatcatgtggaatatcctcatatttttaccatattttaagaactttaagacgattaattgtaaataatttatttgattggtgcagttctaatccctaaatcataatcttaaaatcaggaatgtgtggagaacagagccatgtcatatcactttgctcttaccattccttttgatcagcctcaattcagcctcattgtgtagtatgttttttctttctatgaaaaacaacagaaagcatttcattttatttgcctatgttcaaatatgtttaataatgaccaaagtgcattctgagttttttcaaggaatgtaatactggagctttaagaacatacttagtttctcatgtgaaaacttaggctttgtctgatgtttttccttcctctattgtctaatgttgaggttgtttttaggaattatgttttataaactttttcaatataaggtacatgcctatacagaacttaacattttgcacagaatatatcaaatatattttgagaaaaaaagtacggcatgagttctgttaggaataaaagatgaaactattgtatctcacaaaaaatcttatttcagaatggaaatatttttgagaaaagtagctgagtatactggtttaagaaaatgcttgttttagattgaggttaacttagagttgggagttgatttattaagtacagtatacctctcaacagtttataaataatatgttgaattatgtcagtgtgggcagcagtagaatactaaaaggaaaatgtcatgttaagcaatttcagaacattaactgaactattttcaaagcagaaaaattgacattgctgcctttaagaataccatgaatgtaagaaattgaaagaaattgtaaaatatcacataatatagaaatggcagttcaaagagaattgtggcagatgttgtgtgtgaactgttgtttctttgccacatgtgttgtatttgaaagttttacagtaagtttaaaataaaacattctgtgactgaaaaaaaaaaaaaaaaaaaaaaaaaaaaaaaatcatatacatttctatggtaattttgtgtttacttaacataaaatttagttagatttggggggagtgaaaataaattttttataactttccaacattttagattttgttatgattcttagaacatgaaagaataatacacaggtttttcatcaccaaaatgatattatatcattaatgtttgtttgcttcnnnnnnnnnnnnnnnnnnnnnnnnnnnnnnnnnnnaaatattaaagctcattgtgaaaagaaaaaaaaaa

SEQ ID NO: 7882 - DNA, 3197 bp, Homo sapiens
  misc_feature (2959)..(2978): n is a, c, g, or t
ggaccacagctcctcccgtgcatccactcggcctgggaggttctggattttggctgtcgagggagtttgcctgcctctccagagaaagatggtcatgaggcccctgtggagtctgcttctctgggaagccctacttcccattacagttactggtgcccaagtgctgagcaaagtcgggggctcggtgctgctggtggcagcgcgtccccctggcttccaagtccgtgaggctatctggcgatctctctggccttcagaagagctcctggccacgtttttccgaggctccctggagactctgtaccattcccgcttcctgggccgagcccagctacacagcaacctcagcctggagctcgggccgctggagtctggagacagcggcaacttctccgtgttgatggtggacacaaggggccagccctggacccagaccctccagctcaaggtgtacgatgcagtgcccaggcccgtggtacaagtgttcattgctgtagaaagggatgctcagccctccaagacctgccaggttttcttgtcctgttgggcccccaacatcagcgaaataacctatagctggcgacgggagacaaccatggactttggtatggaaccacacagcctcttcacagacggacaggtgctgagcatttccctgggaccaggagacagagatgtggcctattcctgcattgtctccaaccctgtcagctgggacttggccacagtcacgccctgggatagctgtcatcatgaggcagcaccagggaaggcctcctacaaagatgtgctgctggtggtggtgcctgtctcgctgctcctgatgctggttactctcttctctgcctggcactggtgcccctgctcagggaaaaagaaaaaggatgtccatgctgacagagtgggtccagagacagagaacccccttgtgcaggatctgccataaaggacaatatgaactgatgcctggactatcagtaaccccactgcacaggcacacgatgctctgggacataactggtgcctggaaatcaccatggtcctcatatctcccatgggaatcctgtcctgcctcgaaggagcagcctgggcagccatcacaccacgaggacaggaagcaccagcacgtttcacacctcccccttccctctcccatcttctcatatcctggctcttctctgggcaagatgagccaagcagaacattccatccaggacactggaagttctccaggatccagatccatggggacattaatagtccaaggcattccctcccccaccactattcataaagtattaaccaactggcaccaaggaattgcctccagcctgagtcctaggctctaaaagatattacatatttgaactaatagaggaactctgagtcacccatgccagcatcagcttcagccccagaccctgcagtttgagatctgatgcttcctgagggccaaggcattgctgtaagaaaaggtctagaaataggtgaaagtgagaggtgggggacaggggtttctctttctggcctaaggactttcaggtaatcagagttcatgggccctcaaaggtaaattgcagttgtagacaccgaggatggttgacaacccatggttgagatgggcaccgttttgcaggaaacaccatattaatagacatcctcaccatctccatccgctctcacgcctcctgcaggatctgggagtgagggtggagagtctttcctcacgctccagcacagtggccaggaaaagaaatactgaatttgccccagccaacaggacgttcttgcacaacttcaagaaaagcagctcagctcaggatgagtcttcctgcctgaaactgagagagtgaagaaccataaaacgctatgcagaaggaacattatggagagaaagggtactgaggcactctagaatctgccacattcattttcaaatgcaaatgcagaagacttaccttagttcaaggggaggggacaaagaccccacagcccaacagcaggactgtagaggtcactctgactccatcaaactttttattgtggccatcttaggaaaatacattctgcccctgaatgattctgtctagaaaagctctggagtattgatcactactggaaaaacacttaaggagctaaacttaccttcggggattattagctgataaggttcacagtttctctcacccaggtgtaactggattttttctggggcctcaatccagtcttgataacagcgaggaaagaggtattgaagaaacaggggtgggtttgaagtactattttccccagggtggcttcaatctccccacctaggatgtcagccctgtccaaggaccttccctcttctcccccagttccctgggcaatcacttcaccttggacaaaggatcagcacagctggcctccagatccacatcaccactcttccactcgattgttcccagatcctccctgcctggcctgctcagaggttccctgttggtaacctggctttatcaaattctcatccctttcccacacccacttctctcctatcaccttcccccaagattacctgaacagggtccatggccactcaacctgtcagcttgcaccatccccacctgccacctacagtcaggccacatgcctggtcactgaatcatgcaaaactggcctcagtccctaaaaatgatgtggaaaggaaagcccaggatctgacaatgagccctggtggatttgtggggaaaaaatacacagcactccccacctttctttcgttcatctccagggccccacctcagatcaaagcagctctggatgagatgggacctgcagctctccctccacaaggtgactcttagcaacctcatttcgacagtggtttgtagcgtggtgcaccagggccttgttgaacagatccacactgctctaataaagttcccatccttaatgactcacttgtcaactagtaaannnnnnnnnnnnnnnnnnnnaaaacacaaagtgcttctgtgagaccaattttgtgctaatgagcattgagactgatgctttgtaagtcacaccacaacaaatattgattgagggcgctgcatgtgctgggtacatttcttggcacttgggaatcagtagtcaagcgaaacccttgcctttgagagtttatggtctggataatataaataaacaagtaagcataaaaaaaaaaaaaaaaa

SEQ ID NO: 7883 - DNA, 2565 bp, Homo sapiens
  misc_feature (1535)..(1554): n is a, c, g, or t
tttagcagtctgtgatgatcagcaaaaaagcacataaagtaaaaattagttgaccatgctaaattcaattctggaatttttttttatttgggcatttctagaactttttacatttgaaagtacatgatgagtattagtaacgatgacttatgtataatcagaatctttatgacaatttagttttacaaggtcaaaagagatgagtttgctaaacccagctgtgatacctcagttggaaagggaattcaaaggtatgctttgtagaacagaaaagtatagtttttttttcatgaactttaatcattttctgtttttcctctatgtgagtcagctacaaaagtggtctaatttttacaacagtagaacttcctccttttctactgtaatcttcccactgactttactgcacaggtatgaaatactagtgtattggatcttcagtaacctttttatttcctagatgattgaaatataggtatttactccatttaaaccaggtgataagatgatgtaaatactcagggagggtattaacttgttacttttgctcgtttggggtgtaaagtgccatgactgaataatcttcaattcatgattctagagtaagtttaatttggaaaaaggggcttcacacatggtggtggttgaacattgattcttttatacttaaaaagatgaaaatgttttgtggactgatacattttatcttactgaatatgaattgtttatgtatctctactgtcaaatagcctttttgaaactcaggaaagacaaaggttcaattacaccacttttgtcaataagcaaaccaggtattttttttttctcctgttgtctggatatggcaatagattttttaaattgctgtgagaacccatatatgaaaagagaggagttgaattgtgtgtgccttttatgtcttgagatttatatgtggaaaagacgacatctacttcaaactgtatttttttcgtttttttttttttttggggaaggggggagaacggggtcttgctctgtcgcccaggctggagtgcagtggcgcgatctcagctgactgcaacctccacctcccgggttcaagggattctgcctcagcctcccgagtagctgagaccacaggtgcgtgccaccacacccggctaatttttttgtatttttagtagagacggggtttagtagagacggatcactcctgaccacgtgatccgcccacctcggcctcccaaagtgctgggattacaggcgtgagccaccacccccggcctgtattttcagagaggagagcttggtgtttttgtggtgccaagtggtaagataatgtctctttgaggcttcctatggactgcctttattttagtaaactcaagacaccagttaacctcaacagagttttggccttattagaatttgttgtgcatcttattgaaagccaggtttacatcacctcaccccattattctttttagttaaataaatttaccatgccaagtaaccagaatggagcaaattggttgatctttaaggcagtaggnnnnnnnnnnnnnnnnnnnntattgtcacatctaatgctaggcaccagaaaccatttgagccaggagtgtgaatgaataattccagagacactttagacattttttaatgttttatatgaacattttacatttgtgtgattgccttagatattaaattttcctagtgctgataaaaacagcaacattcataacttattttatatattgttccaaagaaaagaatttgttttaatggtttcaaaataactgcacctgaatttgtttatgtgccttaagttctctagtgctatttcaacttttttttcaatctaaatgaagcttaccttagataaggttcatatttgtttcctatagagtaaataaacttccccttcttaaattgtgtaataagcaccaacgtgtggttgcttggcagaatgagaatgttaagggagattgttggatgtttggagtttcattatattttttgtttttattttttgatacctaggtgctttttaaaatattcagacaaatatctatcttacattgattaaacccgtgtaaattcatttgcagtatctacatcgaatgtcaaaaaagtatacttatttttgttccatacttatgtacaattttttccctcttcaggctttttcatttacctttttgaaaaagcacttactctccccttccctatcacccctcccccaaggtttctttatttaaatttttattgagagttgttggagctctaagacaatacaaatttagagttgaacaaaagtataatctgctttacaactagtatagacctaaggtcatttgctttcaattagaggctccagagtcttcatagtggaaagaatgctttgtatttaattgttcttagttaagttgtagcacgtgaatacttacttacatgttttgtttaaatatacttcttgcatagtttaattttttaaaagttgtatctaataaaatgtcttttaaccattattacttgactatatggttgtattaaattttgtttacgaaaaaaaaaaaaaaa

SEQ ID NO: 7884 - DNA, 2320 bp, Homo sapiens
gggtcagtgtcctgttcatgggagaaaatggcttaacagtctgattttctcaaatgattattgaagagttgttatcgtttttattataaaacacttctgacctgtcaattcaagagctgtttctaggatctttctctccggcaaggggttgttgcactagatttccccagagttccaagttctagttgtgccttttaatgaccctttaatattttaggacataattttttccttttttaaatttttttggtagaaatagatgtttcactacgttgtccaggctggtcttggactcctggcctcaagcaatcctcccacctcagcctcctaaagtgccaaaattatacggcgtgagccactgcacccggcccctatttgaagacgtcttttgtaaaagctagcttctagaacctgagaaaagctcttttctcagaggagatactccttttgatatgttaatgattaagagtggttgcccaggcctagtttcagtggcagaataggattggaacttaaccaagcagaactcatctggcttcagcagattgccaccaagaggatacaggtggtcaggtcctggctggctttgtctttgggcctgggcaggcttaggtttgactttctttgaagtacctgatgctgattgattccactaatagtaggaagcaagagacttaactatgagggacgtccatgtgaatcttaagtcttaccagtcctggcattagtacattaaatttggatgttttggaagcaaattcatatgatcgtgagtgatttctccaaagaaaaaaagccttgtccagcctgaccaacatggtgaaacccccatctttactaaaaatacaaaaattaactgggtgcagtggtgcgcatgcctgtagtcccagctacttgggaggctgaggcaggagaattgcttgaaccctgggaggcagaggttgcagtgagtcgagatcgcgccactgcactccagcctgggtgacagagcaagactccatctcaaaaaaaaaaaacaaaccaaaaaaaaaccctgatgccattcccagtccccgttgtaggacatcacatttataaatccaggctttagtcttctgggctccaccagtctctgccccaccatattcctttgtcactacctctaagtttttttccccacttgaggatttggagttaaacgaactcaaaatgtcttgtcattgtatgtattcttgcccctgctttgaaaacagggccatgggaactctgtttatgccctgttttaatgtttctgttttatgttttactgttaatatgaaaataaagaatttgctatgtaaaaaaaaaaaaaaaacaaaaacccataactaagatccctacctaaacattaaccctaacaggggggcccctccacaatatccctcgtgggggcaaagctcatctgccacccgtttttttgtataaactggcgcctatactcccccgccttacactttttgtcctgccccccgttttacaccccctctcactgttcaaactgctagctccggatttttgtcacggaacccccctttttgcgggggggttataccccccccaaccttccccccccccattcagaactctacgcacaataaaaaaacttcttgaccctcttatgtggctatattacccccccctccccctccctcgccccctttattttccccctttctgacccaataatgttcctaacacccatcctttccccccgcaggctaattccacttttgatttgtgttgtgccggaacttttaataatacccccacccccccccccggtctgtgttttcttttgcgtccctctttctgtcccccccccccaatagtccttcctcccccccatatgttttttacaactccacaccgcgccccaacccacttttattgtttcccccccacacgggactcacttatatttgtgtgccccgccccccacaaagagattgttctccgtccaaccctctttttcccccccgccccccccttattataccgcttttgaacaactggggaatgtgactcactcttcttccccccctcttatatcaccccccccattttttatttcccccgctttttcccaccccattgtgtccccacttcgcccccttttttgtttcccacctttcttttcccccccctctctttttcttattattgccaccatctattgtcttttgtccttcacctctcccctctattttcccccgcccctttgttccgcgcccgttcacctcccaccgtgtgtatcttcttctcctttttcccccccccctctgttttcccctcctctcttcgg

SEQ ID NO: 7885 - DNA, 6900 bp, Homo sapiens
  misc_feature (2032)..(2046): n is a, c, g, or t
cgtaactagttagcatgccagagtctcgttcgttatcgttattttaaccagacaaatcgctccaccaactaagaacggccatgcaccaccacccacggaatcgagaaagagctatcaatctgtcaatcctgtccgtgtccgggccgggtgaggtttcccgtgttgcccgtttctcaggactcgttctcaggcaggagagagcctcggggctgaaggccaggaccagccaggccgcgcggacctgaggttgaggaaccgggtgcaggcgagcacgatgggccggtcgtggctctggttgcagcagctcagacgagtgcgggacccgcagggctgagagtggctggaggagacccagggccctttgaacccgatcccttggccggagacctcagcccagtcggcccagtgggcgaaccggcaccaagagcggcctgcctgtcttcggaactgctgaggcggtggaggccgagagcagggtcatcgtgaggcctgaagtctcttacgcttttggcagctcccctcgcagcccctctggaaacgtacagcctcaggagcagccagtggcttgggacctggggtggtgtgtgtctgcggagcttcttgggctgccccatttcctagcggcccccacctccccacttcccgctcagagttagagataaggatctcagacttttgcctgagtaagggtctccgcactctttatccatttggttttcgatttcccgtttttgtttcttatttcaccaattctggtacacgctagtttttaaggctggaggttctcgagcgcttgctgccaaggactcccccaccccctcccccactgatggagtccgaaatgctgcaatcgcctcttctgggcctgggggaggaagatgaggctgatcttacagactggaacctacctttggcttttatgaaaaagaggcactgtgagaaaattgaaggctccaaatccttagctcagagctggaggatgaaggatcggatgaagacagtcagtgttgccttagttttgtgcctgaatgttggtgtggaccctcccgatgtggtgaagaccacgccctgtgcacgcttggaatgctggatcgatcctctgtcgatgggtcctcagaaagctctggaaaccatcggtgcaaatttacagaagcagtacgagaactggcagccaagggcccggtacaagcagagccttgacccaactgtggatgaagtcaagaagctctgcacgtccttacgtcgcaacgccaaggaggagcgagtcctctttcactacaatggccacggggtgccccggcccacagtcaacggggaggtctgggtcttcaacaagaactacacgcagtacatccctctgtccatatatgacctgcagacgtggatgggcagcccgtcgatcttcgtctacgactgctccaatgctggcttgatcgtcaagtccttcaagcagttcgcactacagcgggagcaggagctggaggtagctgcaatcaacccaaatcaccctcttgctcagatgcctttgcctccgtcgatgaaaaactgcatccagctggcagcctgcgaggccaccgagctgctgcccatgatccccgacctcccggctgacctattcacctcctgcctcaccacccccatcaagatcgccctgcgctggttttgcatgcagaaatgtgtcagtctggtgcctggcgtcacactggatttgatagaaaagatccctggccgcctgaacgacaggaggacgcccctgggtgaactgaactggatcttcacagccatcacagacaccatcgcgtggaacgtgctcccccgggatctcttccaaaagctcttcagacaggacttgctggtggctagtctgtttcgaaattttttattggcggaaaggattatgaggtcgtataactgcactcccgtcagcagcccgcgtctgccgcccacgtacatgcacgccatgtggcaagcctgggacctggctgttgacatctgtctgtctcagctgccgacgatcatcgaggaaggcacnnnnnnnnnnnnnnncccgttcttcgccgagcagctgaccgcattccaggtgtggctcaccatgggcgtggagaaccgaaacccacccgaacagctgcccatcgtcctgcaggtgctgttaagccaagtgcaccggctgagagcattggacttgcttggaagatttttggacctgggtccctgggcagtgagcctggccttgtctgtcggcatcttcccctacgtgctgaagctgctccagagctcggcccgagagctgcggccacttctcgttttcatctgggccaagatcctcgcagtggacagctcgtgccaggcggacctcgtgaaggacaacggccacaagtacttcctgtcggtcctggcggacccctacatgccagctgaacaccggaccatgacggctttcattctcgccgtgatcgtcaacagctatcacacggggcaggaagcctgccttcagggaaacctcattgccatctgcctggagcagctcaacgacccgcaccccttgctgcgccagtgggtggccatctgcctcggcaggatctggcagaacttcgactcggcgaggtggtgcggcgtgagggacagcgctcatgagaagctctacagcctcctctccgaccccattcccgaggtccgctgcgcagcggtcttcgcccttggcacgttcgtgggcaactctgcagagaggacggaccactccaccaccatcgaccacaacgtggccatgatgctggcccagctggtcagcgacgggagccccatggtccggaaggagctggtggtggctctgagtcatcttgtggttcagtatgaaagcaatttctgcaccgtggccctgcagttcatagaagaggaaaagaactacgccttgccttctccagcaaccacagagggagggagtttgaccccagtgcgagacagcccgtgcacccccagacttcgttctgtgagctcctatggaaacatccgtgctgtcgccacagccaggagcctcaacaaatctttgcagaacctgagtttgacagaggaatctggtggcgcggtggcgttctcccccggaaacctcagcaccagcagcagcgccagcagcaccctgggcagccccgagaatgaggagcatatcctgtccttcgagaccatcgacaagatgcgccgcgccagctcctactcctccctcaactccctcatcggagtttcctttaacagtgtttacactcagatttggagagtcctgctgcacctggctgctgacccctatccagaggtctcggacgtggccatgaaagtactcaacagcatcgcctacaaggccaccgtgaacgcccggccgcagcgcgtcctggacacctcctccctcacgcagtcggcccccgccagccccaccaacaagggcgtgcacatccaccaggcggggggctcccctccggcgtccagcaccagcagctccagcctgaccaacgatgtggccaagcagccggtcagccgagacttgccttctggccggccgggcaccacaggccccgctggggcgcagtacacccctcactcccaccagttcccccggacacggaagatgttcgacaagggcccagagcagactgcggacgacgcggacgatgctgctggacacaaaagtttcatctccgccacggtgcagacggggttctgcgactggagcgcccgctattttgcccagcccgtcatgaagatcccagaagagcacgacctggagagtcagatccgcaaggagcgggagtggcggttcctgcgaaacagccgtgtcaggaggcaggcccagcaagtcattcagaagggcattacgagattggacgaccaaatatttctgaacaggaaccccggcgtcccctctgtggtgaaattccaccccttcacgccgtgcatcgctgtagccgacaaggacagcatctgcttttgggactgggagaaaggggagaagctggattatttccacaatgggaaccctcggtacacgagggtcactgccatggagtatctgaatggccaggactgctcgcttctgctgacggccacagacgatggtgccatcagggtctggaagaattttgctgatttggaaaagaacccagagatggtgaccgcgtggcaggggctctcggacatgctgccaacgacgcgaggagctgggatggtggtggactgggagcaggagaccggcctcctcatgagctcaggagacgtgcggatcgtccggatctgggacacagaccgtgagatgaaggtgcaggacatccctacgggcgcagacagctgtgtgacgagtctgtcctgtgattcccaccgctcactcatcgtggctggcctcggtgacggctccatccgcgtctacgacagaaggatggcactcagcgaatgccgcgtcatgacgtaccgggagcacacagcctgggtggtgaaggcctccctgcagaagcgtcccgacggccacatcgtgagtgtgagcgtcaatggagatgtgcgcatctttgatccccggatgcctgagtcggtaaatgtgcttcagatcgtgaaggggctgacggccctggacatccacccccaggcggacctgatcgcatgtggctccgtcaatcagttcaccgccatctacaacagcagcggagagctcatcaacaacatcaagtactacgacggcttcatgggccagcgggtcggcgccatcagctgcctggccttccacccgcactggcctcacctggccgtgggaagcaacgactactacatctccgtgtactcggtggagaagcgtgtcagatagcggcgtgacccgggcccaccaggccacggccgcctgctgtacatagtgaagctgtcactcgccggggcacggggcgtcggctgctgcggccccgcagtgtgaacgttggctgctgccttagctgctgatgacggcaggagggccctgctactcgcttttgtctgtcttcgctgtcgtgtctggaatgtcagggaaggggagggctcgggttgacggtggcttcccactgagcaccagcatccaggtgcacccccgcggccacggcgcctctgtccctctcctgttctgtgtttctctgagacgctgaaaggggaaacacctcactttatttccatgtaatcagagcattagctgcagaaaaacccccagacagagccctggcggagaggcaggcgctggggctcctacgggtccctggggcagctgtccccatcaggccaagagcgagcgagaggcgctgccccagccaggcccaccacctctcacagtcagtgcacgcaagcagggacatttcctagccagctgggggacactggaaattcgggaaaccaagagagaggaagaaggagacgcccctccaactggcgggtgtgaaggaagccgcccaggggtccgggctgtccttggccgctggcagcatcactgagcaggaagcgcacagcccaccctccccgcacctccaggtctctggactccagttttggcccctctcacacagagctgtcagcaggggccgctgtggcggtgcacaggggaggcaggtccttggcgaggtagcccctgccttaatccacggggctcctttccctccgaagggctgctcttccccacaggcgcggggacagcagcccgacctgtggtctccatgcctgtgccctcacacaggtgtagcacacgcatgtgcagatggcaccacggccggcacctgggggcacacacatgcaggcggcgtggtctccctgctctgtccccacacgttcctcacatacaggcaagaggcactgccgggtcccggacggctccgggtgacaccagccccgtctccagccttgagccgcccatgctgatgcgacctcggctgacagctgggcctgtggtgcagacaggagctgtgtggacagtcccgcccaggaggggccgcagggcgtgtatgagcagttttgcaaacagaacacaaccacaatgatggtattttgaaaagtgttctttccgtgttcgtcgggaatcaggattattgagaggtgaaggagccaggtggcttcattctggcggtgagaggcccatgaccacgggagtgagagctggtgtggcgaggcccggctctcctgcggtgtggctggtggcctgccgtggccaagagcatcttctgggtggatggaaccctgcctggtcacatttggccagagacacacctggccctcagggggctgagctggagactgagctggggctggccgggacgtgacaaggcaggacagaggcggcccctccgctgctcctttttggaatgcgagctcccaccagaagaaggttccggcacgaatcccatccccacgtctgggccgagaaagcagcccgggtccggaaggtgtagagagtcccggcctcactcagctcacagggcgtgccaggcggcaacaccagaatcttccagaagcccagctccacccgcacacgcagcttcccatccagtccttcaactcaattcttacccaacacgcgtttctgtttgttttgagacaaaatcaccacctgtcaaaaggcaggtggctccagaggggtcaagaccccccccccgcccccgctccaccctggagcccacccccatggcaccgcgtgccgcctgcacgtgggctgtcttcacaggtctgatgtgaaaattcaatcacgacgttaaccggctcgagagagcgccggcctagaggctcattatctatttattttaccaaacgcgaattgagacggactttgacaaaacacgaaatggtaatgtgaagctaagagcagagagtgaccaacagtaaacaacacgcgcagaaaaaaaaaaaaaaaaaaaaaaaaaa

SEQ ID NO: 7886 - DNA, 5699 bp, Homo sapiens
  misc_feature (830)..(846): n is a, c, g, or t
  misc_feature (849)..(909): n is a, c, g, or t
ggggtcgcgggggacgcgggggacgcgggggacgcgggggacggcggggaacggcggggaacagcgggggacggcggggaacagcgggggacggcggggaacagcaggggactgcgggtcgcgtcctggccgccgaggagctccttcccttaacagagctgagagaggcatctggagctgcagcatggaccagcgagagcccctgcctcccgctcctgcagaaaatgaaatgaaatatgataccaataataatgaagaggaagagggagaacagttcgattttgacagtggagatgaaatcccagaagcggacagacaggccccatccgcccctgagacaggaggtgctggagccagtgaagcccctgcacccacaggaggtgaggatggagctggagcagaaaccaccccagtggcagagcctactaagctggtgctcccgatgaaagtcaacccatattctgtcatcgacatcacgccattccaggaggaccagccgcccacccccgtgcccagcgctgaggaggagaatgtgggtctccatgtgccctgcgggtacttggtgcctgtaccctgcggctatgcggtgccctccaacctgcccctcctgctgcccgcctactccagcccggtcatcatctgcgccacgtccctggacgaagaagaaacaccagaagtcacagaagatcgccagcccaattctctgagttccgaggagcctccaaccagtgaagatcaagtcggtcgagaggacagcgcacttgcccgctgggccgcagacccggccaacacagcctggatggagaatccagaggaagcaatttacgatnnnnnnnnnnnnnnnnnctnnnnnnnnnnnnnnnnnnnnnnnnnnnnnnnnnnnnnnnnnnnnnnnnnnnnnnnnnnnnnggaaacagctccttggaatacggatggagttcgagtgaatttgaaagttacgaagagcagagtgactcggagtgcaagaatgggattcccaggtccttcctgcgcagcaaccacaaaaagcaactttctcatgacctaacccgtttaaaggagcactatgagaaaaagatgagagatttgatggcaagcacggtgggcgtggtggagattcagcagctcaggcagaagcatgaactgaagatgcagaagctcgtgaaggccgcgaaggacggcaccaaggacgggctggagaggaccagggcagccgtgaagaggggccgctccttcatcaggaccaagtctctcatcgcacaggatcacagatcttctcttgaggaagaacagaatttgttcattgatgttgactgcaagcacccggaagccatcttgaccccgatgcccgagggtttatctcagcagcaggttgtaagaagatatatactgggttcagttgtcgacagtgaaaagaactacgtagatgctcttaagaggattttggagcaatatgagaagccgctgtctgagatggagccaaaggttctgagtgagaggaagctgaagacggtgttctaccgagtcaaagagatcctgcagtgccactcgctatttcagatcgcgctggccagccgcgtttccgagtgggactccgtggaaatgataggcgatgtcttcgtggcttcgttttctaagtccatggtgctggatgcatacagtgaatatgtgaacaatttcagcacagccgtggcagtcctcaagaaaacatgtgccacaaagcccgcttttcttgaatttttaaagcaggaacaggaggccagccccgatcgaaccacgctctacagcctgatgatgaagcccatccagaggttcccacagttcatcctcctgctccaggacatgctgaagaacacctccaaaggccaccccgacaggctgcctcttcagatggccctgacagagctcgaaacactagcagagaagttaaatgaaagaaagagagatgctgatcaacgctgtgaagtgaagcaaatagccaaagccataaacgaaagatacctgaacaagcttctcagcagtggaagccgatacctcattcgatcagatgatatgatagaaacagtttacaacgacagaggagagattgttaaaaccaaagaacgccgagtcttcatgttaaatgatgtgttaatgtgtgccaccgtcagctcacgcccctctcatgacagccgtgtgatgagcagccagaggtacttgctgaagtggagcgttccactgggacatgtggacgccatcgagtatggcagcagcgcaggcacgggcgagcacagcaggcaccttgccgttcacccgccggagagcctggccgtggttgctaacgcgaaaccaaacaaagtttacatggggccaggacaactgtatcaagatttacaaaacttgttgcatgacttaaatgtaattggccaaatcactcagctgataggaaaccttaaaggaaactatcagaacttaaaccagtcagtagcccatgactggacatcaggtttacaaaggcttattttgaagaaagaagatgaaatcagagctgcggactgctgcagaattcagttacagcttcccgggaagcaggacaaatctgggcgaccgacgttctttacagctgtgttcaatacgttcacccctgccatcaaggagtcctgggtcaacagcttacagatggccaagctcgccctagaagaggagaaccacatgggctggttctgtgtggaagacgatgggaatcacattaaaaaggagaagcatcctctcctcgtcggacacatgcccgtgatggtggccaagcagcaggagttcaagattgaatgtgctgcttataaccctgaaccttacctaaataatgaaagccagccagattcattttccacggcacatggtttcctgtggatcggaagttgcacccatcaaatgggtcagattgccatcgtctcgtttcaaaattccactcccaaagtcattgagtgcttcaacgtggaatctcgcatcctgtgcatgctgtacgttcccgtcgaggagaagcgcagagagcctggggcacccccggaccccgagaccccggccgtgagagcttctgatgtccccacgatctgtgtagggacggaggagggaagcatttccatttataaaagcagtcaaggctccaagaaagtgagacttcagcactttttcactcctgagaagtccacagtcatgagcctggcttgcacgtctcagagcctgtacgctggcctggtcaacggggcagtcgccagctacgccagagccccagatggatcctgggattcagaacctcaaaaagtgatcaagttaggcgtcctaccagttagaagtctactcatgatggaagacacgttgtgggcggcttccggaggtcaagtcttcatcatcagtgtggagactcatgctgtagagggtcagctggaggcccaccaggaggaaggcatggtgatctcccacatggccgtgtccggcgtcgggatctggattgccttcacctcagggtccacgctccgcctttttcacacggaaactctcaagcacctgcaggacatcaacatcgccacccctgttcacaacatgctgccagggcaccagcggctgtcggtgacgagcctgctcgtctgccacggattgctgatggtcggcaccagcctgggagtcctcgtggccctgccggtcccacgtctgcaagggattcccaaagtgaccggaagaggcatggtctcctaccatgcacacaacagtcctgtcaaattcatcgtcctggccacggctctgcacgagaaagacaaggacaaatccagggacagcctggctcctggccccgagcctcaggacgaagaccagaaggacgcacttccgagtggaggagctggttcatctctgagccagggtgaccctgacgcagccatctggttgggagattcgctgggatcgatgactcagaaaagcgacctgtcctcctcatctgggtccctgagcttgtctcacggctccagctctctagagcacagatcagaggacagcaccatctatgatctcctgaaggatcctgtctcgctgagaagcaaagcacgccgggccaagaaagccaaggccagctcggcgctggtggtctgtggagggcagggccaccgccgggtgcacaggaaggcccggcagccccaccaggaagagctggcgccgaccgtcatggtctggcagatccctctgctgaatatataagcaggacggccgccttctgctgtcagaatttgcaatcaagggtgacttctcagctaatcctacagcctgagtggttaagctgtgtctacactggttgggaataaattaaaaacagtatttgggggagaaacgtgcaatagcgtaatggtggtgtccctgccaattccttccttctcttctgtacagcagaagtaattacaagcacttctcacgaaggcagaagactgatgcaattttcgagtaattgagtgcagttctgggaaaataccacattctttttgactgctgtagtccatatatgaatactaaatgttaaacttcatcagcgtcagacctattgtatcatattagagaatttgcagactaagaatttatgagaaaatatatgtattcagtagtgcaggcatttattaacaattcttaaaagttttacctgattcagattcacgacttttatttatattctatatttttgaatttcagagtaaaatttgttaacaattttaaaagccaggtaacacctaccagtccagttagcatgatttgctttcagaagtgagctgggttttccaaagtggtataatgtgtgtactgtatattttaacaaagtaatatttttgtattgcatttttctattaaaaaattaacagttaatgtttcagtcaatgtattatctgtagcatttcacaaataatgtttgctttgaaccaaaatgctcagtgcctatcaacatttggactcaagcatcaacaccaaattattcctcccttctcgtataaatagagtgactatccacaggagaaaagtgtgtgctttagtattagaggagataggcagagaagtcttgcttagttccttcgtgcagcttcttgcccctgttgacgtggaatgctgtgtctgctttagcacgcacgctccgaatgactcctggtgctaggccatgctggctgctgtcactgagcgggactcaggccaagaggcgtgacctcgggccagcctgtctgttgtgcagacgcctcctctgcagaacgcatcagtttctattctgcagttgcagagccagccccgcgtgagaacgtgcataatgagtgcacaccatcatgtcaaggtgcatacttagtgagcgccatcctgctgaacgtgtatttcagtgtttcacttactggacggataacaagaaaaaaatcctaacacaggcagtcaccagaaataaatgtctcagcactttacagatgactaaaaatgttaattttatgacttagccaaatatgttctaggttgcatatatcccccatgtgaaagtgatttcttcccaagcttctcaaactgttagctgctgtctgacttcatcaataaagtatttttattttaaaatgcaaaaaaaaaaaaaaaaaaaaaaaaaaaaaaaaaaaaaaaaaaaaaaaaaaaaaaaaaaaaaaaaaaaaaaaaaaaaaaaaaaaaaaacaaaaaaaaaa

SEQ ID NO: 7887 - DNA, 550 bp, Homo sapiens
gaatgataatatacagtgattaaaaatatagttagagaattaaatacattaatacctatagaggactatagaacagtacctggcatattataaatgtctaataaatatcaatattacctctaacccatgggatctctactgggaggctgttactcctctcaaaggacatttgccaatgtccgcagacagttttcattgtcatgagtggggagcaggggtagaggcctgggatgctgctcagcatcctaggatgcatgagacagcccttgaaaatgaagaatgaggcatcgcaaaatgtcagcattgctgaggctgaaaagctcggctccacttatgccaccattttctcaagcctcaatcaagcgtccattctgttttttctccgtcctccactcccttgaatgctcattttctcacctggtttcagttacaaactggttttgatcattctgcaatctacagttccatcatcctgaataataatatctccagtggtggatagaaaaatctctcctggcatgttctcccaatattggaaatggtgaagacc

SEQ ID NO: 7888 - DNA, 3807 bp, Homo sapiens
  misc_feature (1253)..(1267): n is a, c, g, or t
tgatttgccacgtcgtccatatctccccggatgtgggaactggcggtcgtgcactctgggggtggcgttgttctcgttccctacttgtggggtggcctttttcagcggaggaagaggatgccgcgggcattggtagccggcgggactacacttgggctaggatcagtgttccgcgggttcagaaatcaccgtgtccttggcatcacctccctccccacctcctctcccatcgcacagcaggagacagtgactggagggttttcaaggaggactgcattgcccctattgaaacaaaccgtccgacaaaccctttctccgacgtgtgacagagggacggtcgtaatgtgaaatacgactagacatgcgtttaatgggcggtgtgattgctgcattcgtgcgcaatgaatggtccaggccatttgtgtccagtagccgcacaagctgcagggtctcatgtttagagagggagggcctctccgccgtccaccttgctggagtacaggcgaccctgggcggtagccctctccgccatcagaaatgtggtgctctgagtagccacagattcccatctgcatctccaataccatttccctctactcactgacccgttgggtgcgttggatttgtgcgtgggtgtgagggtagtttggtgtgtttgcttgcaaatggaaaagcgaatggccttggttggctgagcttatcagggcactagcagtggagagagaaaggactactgtattcttaggagcagaatctcaacaacttcctataaaacgggcagtgtgtcttacctggaatgctttggcatttaataaaatgtcctgtgaatacttttcatagggaagcactttgtttttactgtttctggttggacagtggttacatttcaaatcgtagttcagaattcgtgaaatacccaaattaaatctctacgtggcagtaatccattttctttccttggtgtgtggttggaagattaatttgagataagtgttcagttctgggctgggcagtcgtgccgggcacgggaaattcaggttctttaagggaaaggcctgatgtgctaagacgaaatctataccgtgtgtagccgcttatgagaatatgaaactaaggagagccacaggtaagtatacgtctatgaatgcgaattaaaacgggtgacaatataaagagagattggtgtcacaaatggtggagtgacttttgtatttcagcagacctcagtgagaaatggtcaccaccactccctnnnnnnnnnnnnnnnagtgagttgcttaacctctctgatcctgttacctcatctgcaactggggatgagaatatatatcatagcatgccctgggagaagctgttcctgaccacctgggctatggtgattttgacttcctctgtgtcagaagtacccccgtctcatgcctgccatagttgtctttttgttttgttttgtgatttcagatggactcaccctgtcacccaggttggactgcactggcctcaacctcctgagttcaagtgatcgtcccacctcagcctccccagtagctgggaccatagctgtgcagcatcatgcctggctaattttttaagttttttgttgagatggtggtctcgccctgttgctcaggctggcctcaaactcctgggctgaagcagtcctcccacctcagcctcccaaagtgcttggattagaggcgtgagccaccattcctggctccttggacaatattttattcctcagattaagacacgtccttgggatggggctgcattggataattcaccgaaggcaccgctgaatggagtgggccctcagtaaatacctggaggaatgtgacctggccagtgaggttattttcttttgtaggtgaaaggtgtagcagtcactcggcctacacccacagcatcgaccttgtgaacccagcgacctgactgccttgggagaattgaagcgaatgagagtggggagtgtgagaggtgcgtttggtgcagcatttctggcatgggaacagaactggccaggaggaagtgacgtctgggttctgcccgcacacattcctcgccaccttcttggtgtctgagaacctccagcttcacctccttttctggacccgagggcctggcggagcttccagctgggaccagacctccatggatccactccagaaacggaatccagcatcgccttccaaatcttccccgatgacagctgcagagacttcccaggaaggtccagcgccctctcagccttcgtactcagaacagccgatgatgggcctcagtaacctgagccccggtcctggccccagccaggccgtgcctctcccagaggggctgctccgccagcggtacagagaggagaagaccctggaagagcggcggtgggagaggctggagttccttcagaggaagaaagcattcctgcggcatgtgaggaggagacaccgcgatcacatggccccctatgctgttgggagggaagccagaatctccccattaggtgacagaagtcagaatcgattccgatgtgaatgtcgatactgccagagccacaggccgaatctttctgggatccctggggagagtaacagggccccacatccctcctcctgggagacgctggtgcagggcctcagtggcttgactctcagcctaggcaccaaccagcccgggcctctgcctgaagcggcactccagccacaggagacagaggagaagcgccagcgagagaggcagcaggagagcaaaataatgtttcagaggctgctcaagcagtggttagaggaaaactgagacgtgcacccccatgggatggagacccgaagggactcagacggagccgccgtgttggcagcgcctgggtgtgggcccattttggggaccaaacagcaagctgtggtcggatgagtgccaggacctgtgtaccgggacacgtgggagtcctcccagcatgatgcttgactgacccgaggaaggtcctcatgtttcgtgcctgtcattctcggatggctgtgaggcattccttggcaagggatgctgcgtaccagcggtcctcaccgcatctcacatggctcctgtgatgcatgttgtcgctttcccacccgggatctccatctctcttcccttcctgctgtcagtaagagatcacatgtctgtgtagtgtgaatgccttgtcgctgtcctgtgcttttgcaccattgagttgactgcctctgagaagcagcactaggcctgttgaaatgcaatgtgctgccctgagatccagtttcaagaatgggcaggtaaacgcagtgtgggaaaggaatgtggaatgagaacttggtggttcaccgctgtactatttgtgtaaatgtttacgtatgtgataagctacatgtatgtaaatgttgcaatacccctaacagtcgagtagtagtctcccttacaggaatttttgacggggttcctcatcatcaataccaaataaatatatgtaggaatggaaaaaaaaaaaaaaaaatagaaattgaacgttcaatttctacaccaaactaatactaattgtggacataccttatgttttcaggactctgcctttgtatgtggtgtttcttcaacttggaatgccctgcctcccgttctccaactggcaagcctagtattttctcaggactctgcaaagccttccctaaccgcccccgcaacacaaggcggatgtggtaccctcacttgtgcctccgtaacagtgcgcaggtttatcagagctctccccatgcatggtagtcagctgttcctggtctgcccctcccacttagtacgtgttagcga

SEQ ID NO: 7889 - DNA, 1439 bp, Homo sapiens
  misc_feature (354)..(354): n is a, c, g, or t
actgcggattcgtttcgtggaaggcgccggccggccagtcaccggagggatcccgccagaggcggctccgcgtctccagcagcggggcagggacccgggcgccccgccctcgccagcgcccgcccccgcccgcccccggcccgccctctgtatctggcccctgggcagctgcccggggaggcacgagggcgagctggggccgcgcaatgtcgcacggagccgggctcgtccgcaccacgtgcagcagcggcagcgcgctcggacccggggccggcgcggcccagcccagcgcgagccccttggaggggctgctggacctcagctacccccgcacccacgcggccctgctgaaantgcgcaaatggtcaccctgctgattgccttcatctgtgtgcggagctccctgtggaccaactacagcgcctacagctactttgaagtggtcaccatttgcgacttgataatgatcctcgccttttacctggtccacctcttccgcttctaccgcgtgctcacctgtatcagctggcccctgtcggaacttctgcactatttaatcggtaccctgctcctcctcatcgcctccattgtggcagcttccaagagttacaaccagagcggactggtagccggagcgatctttggtttcatggccaccttcctctgcatggcaagcatatggctgtcctataagatctcgtgtgtaacccagtccacagatgcagccgtctgatgaggccacaacccctaggcccctcaggagctttgcagagaggaggacgtgtactccaggcgaggcctctggacctgtgttcctgtgccaaagtcctgtcaggctggtgggcaccaggaaaggcctgcaccctcttcctgctctcccaggaagccagctccctgagctcctgagccagccggaaactcttcctccagccttccggggagaacatccctcccattctgggaaaggaaagcagcctccagggaaatgttttctgccttcctgcttctagaaccacctcaggtactgatgaaccccacttagcacagctgaaggggtttgtgaatactcccgcctaaatcccttctacttcactcctcaggggagtgaagtgccttaagaaacaaagccctgtcctaatttatctagcttgtcagtccggtcttagagataccctctttcctgaagtgaggcgtgcctgtagaaacactatgtggtcagcctgtccccaaggagatcttgtgtctcctctccatctctgcctttgttaccagtgtgcatgtgtttgtgtgtttttttaataaaatattgactcggccagttaaaaaaaaaaaaaaaaaaggctctaatcgggggccgaacagagtatgaatggccatggcatcggccgccccctttgacaagggaaaccggcccataggggacataacgtacgtaaaac

SEQ ID NO: 7890 - DNA, 2846 bp, Homo sapiens
  misc_feature (376)..(468): n is a, c, g, or t
  misc_feature (1490)..(1514): n is a, c, g, or t
ggtgtgaagagccatccagagtgagtgcctggggcagagtgagagcaggaccagcgggcaggtggcggagcgggggtcggtggtggatggcccagccctggaaagccgaggtgaaggttacgagtccctgaggatctgtgggtgtgagccaggcacgaggggcggcggcggcgagcgtggacagaagtggcggttgctgacgcctggaaattcccctgaaggtggagcaccacccaacccccctgggtcccaccctccctcaaggcctcctccacctccacctccaccccgcctggcctggcgtccacctctgcggctcctacctgggtgcaatcgagttaaatggctgataagcagatcagcctgccagccaagnnnnnnnnnnnnnnnnnnnnnnnnnnnnnnnnnnnnnnnnnnnnnnnnnnnnnnnnnnnnnnnnnnnnnnnnnnnnnnnnnnnnnnnnnnnnncagcgcgtgtacacgagcatgtccgactgcctcatcaagaccgtccgctccgagggctacttcggcatgtaccggggagctgctgtgaacttgaccctcgtcacccccgagaaggccatcaagctggcagccaacgacttcttccgacatcagctctctaaggacgggcagaagctgaccctgcttaaagagatgctggcgggctgtggggctggcacctgccaggtgatcgtgaccacgcccatggagatgctgaagatccagctgcaggatgcagggcgcattgccgcccagaggaagatcctggctgcccagggccagctctcggcccaggggggtgcccagccctcagtggaggctccagctgcccctcggcccacggccacccagctgacccgcgacctgctgcggagccgtggcattgccggtctctacaagggactcggggccacgctgctcagggatgtccccttctctgtggtgtacttcccgctctttgccaacctgaaccagctgggccgcccggcgtccgaggagaagtcgcctttctacgtgtccttcctggccggctgtgtggctgggagtgccgccgctgtggccgtcaacccctgtgatgtggtgaagacgcggctccagtcacttcagcgaggcgtcaacgaggacacctactctgggatcctggactgtgccaggaagatcctgcggcacgagggcccctcggccttcctgaagggcgcctactgccgcgcgctggtcatcgcgccccttttcggcatcgcacaggtggtctacttcctgggcatcgcggagtccctgctggggctgctgcaggacccccaggcctgagcccagcacccgctccaccccagccagctgggcagggccggtgtggggctggagccaggcagctagcccaggacggagcaagggaagacccctccccagccctcccgtcggcaggggcagcagggggcagggtgcagggtccacataggtggtgcacacgcaagccccccggggtnnnnnnnnnnnnnnnnnnnnnnnnntctcatttatgtagaaaatgcagaaatctttacattcctcaagctagcccctgccccaatcctgccctggcctgaacacccccagggacagagctggtctctgggctgggggcccccgggcctgggccgggcaggctggaccatacccccagtccaccagctccagtctccacagccatcctggcccacacaggcaccccacacaaacctatttattgaatctgctggacccaagcggctctccagcccttccgtccttccccagccgctcttgtcgccttggcaggacttgactctgcctccctggccagccttgcaagaggactggggtctcctgccctctctgttgagccaggaatcccaagtgaggggttgccctgaggtctgactcttggggcaagcccgccacccactgtgggactttctggtgggctcctcagctcccaccccaggctggggcccagattgtgaggtctgtgtgcatgtgtgtgtgtatgtgtgtgtgcatgcgtgtgtgtgttgtggggatctggcctggcccttggggatggggctgctggggactgccccccttcccgccgtggccaggcgctctgtgtgctgtgtgtgccccaggctctgttgaccccgtccaggaactaacttacccagcttggtctctcctgagtcctccaccctggcctgggattggccagggagcagggcgggcattgggaccagtgtggagcctgagggtgcctgccctgctctggagggagggccaggagctgccacacccccaagtcctctcagggcccaccctcctttttcagcctctgcataaggcccctgggtacactgcagaagccccatccttcccgcctccgggcataaggcccctgaccacacttcagaagccccatcccccctgccaccgggcgatccctgctgtgagccgaagctctccctgccccgccctggccatgtgatcgtgttggtgacagaccctgatgtgctggtgctgtgtccccaaaaccggggccctccacagaggccccttcccagcgacactacctggggctcaggcctggacccccccagttcacggttgctcctgggagctgcccctcccgtcacatcagaaccttggaagctgctgctgctgcttacagaattatatttttttcttttgaagagttttaagaagttgtaactttttgtgtcttgtcatgtcagagaataaataaatattctaagtagaaaaaaaaaaaaaaaaaaaaaaaaaaaaaaaaactgggaagataacaaagtaaaccccccttggaaaattctttgctttgccagggctgtccc

SEQ ID NO: 7891 - DNA, 6271 bp, Homo sapiens
  misc_feature (31)..(31): n is a, c, g, or t
  misc_feature (41)..(42): n is a, c, g, or t
  misc_feature (1049)..(1107): n is a, c, g, or t
  misc_feature (1118)..(1134): n is a, c, g, or t
  misc_feature (3294)..(3314): n is a, c, g, or t
  misc_feature (3509)..(3642): n is a, c, g, or t
  misc_feature (4913)..(4931): n is a, c, g, or t
ccaggtaataaaccttttgccattccacttntaaatccccnnttatagcattagttttaaagggaaatgtttttttttttttattatttgatttggtatttaataacagttataagtacaatggtagacactgaaaaagaaaacccttaatagaaaagaaaaagacaatttaaaattagattttgttgaagggtgttataagtgcaactttatccatatgcattccttttaaggcattttcattgtccaaatatctcaacatgtacatcaaggtttatattataaaatgggctccttttgtattcattcaagacttaaagaaaaaatacatctcaggactaagtgtagctgaaaagaaaaacacaaaaattcaccactcacaaaaagtaacttaaaatacaaaagtcatttagtatacattattactccccattgtaattccagatttggtacagtatctttttcatttcctgacataaaccattaagacagcacaggctgtagtacttcattgtgaggtggctacaactctataatatgcacagtgattttaaaataggctttttgcatgccttgcatgaaaggtgctacatacaaacctgttttgtgaactctttggtaaccaccaatttaaaaatttggatgaaagcatttccacatggacagatctgaagcacattattggagctctgagccaaagctattaccctgtatattgattcttcagtttccttgaggggttaggtgttgatttagaatacagccagataatttaaagcatgtcaggccccggttaggaaaatgaaaatggctccgattcgtttccagttggctttattattgtttggcagaagttgtttaggggagaagagtggcttcctacaaagtttgcttctcaaggtatactggagaaagtaaaatattcatgtggttactactgtctagtcgtttcttgaaatggtatgaaaaaagtgtgatgaatataattgagattattcatatttttgtagtctcaatgtgttcccttggttgtctctttaattgtcccnnnnnnnnnnnnnnnnnnnnnnnnnnnnnnnnnnnnnnnnnnnnnnnnnnnnnnnnnnngttttcagcannnnnnnnnnnnnnnnngcactaatgcacttaacccagcatgttctgtattttaggatattagtgttctggagaggtcaagctggaatgtcattcgccctcattgggctacatcaccacccattaaatttcagcttttcagtaattgttctgggatgtgttctagttgtgcaaattagatgctagctaatataaatctaagttacccactaactgtatttagccataacataatttctatgtttacttttatccacctaaaaatgaatgtacattttttgacatgcaattgtctctagactgctctgatacctattaccaatgtgctacttgaatccagggagttatgacagagagagatgtttcaaagtctacggaaaaggttttagatatttctgttgtgcattatttttgtatgttagtaagaatcctttgtatttccatttacatagcacctttcatccaagattttcaaaatgatttaatgttaacagcatttggtggtaaaacctaagttaccggtggcattgaagtacgtaagtaagctcaagttctctaagttccatttcaatttaaacatgctctcttttttattgatggtcttttggaaattagactgtgaacacaacattgctactggcctacgaaagagagagagaaagagggagagagaaagagagagagagagagagagagacttttcttatggttactgggttagtgatgaaacccacaactcataaaccacacactatggaatatggaattattccaaaaagttcttcagagctggtaatgaaagcctaagaagtacactgttaaaattttaaaaagtcagtatgtttctcatttcagaccttgaagattactctgatattgatgttaaataatgaatttgcattaatgagtatcaatgcattttttgatttcataagaaaataaaactgtgatataaaattggaactactaaaaaaattgatgtttccctgggttaactaaatctatttttttgtgcttcttccaaatgtttaaaggtaacaaatacatacaaatatttcaaaagtaccaataacagttatcaactttaatgtaatatcataaaggagaaaaaaatcattaataaatgatagccttaattataaatgagtttctggcaaaatgcagatcatagtaacttatttacattatttttgccataagaaaacttcttaagcaacagtcagctctcaagttaaaaaaatgcacacgcatacataacccaataccaaagaaaagaaatgagttaaagcacaacagctttatcttgggaatgccatttgctgaaaaaccatcttactaaaaaaaagtttcagaaaaacactctttaccatgggttaacttatgaatgcttagtgttgcttaatgggaaatatggaaagattaatatcactataaattttttataactcctatttcattatggatttttcagatttatcttataaactgaatttcttttgcatcaaaataattggctttaagaaaaaaaaagtatcaacacatgcagtctgctaaccaaataaggctctgacatgccaaaacaattttctctgtatcttgctatatagtacattccacaaaatactacagcatttaatttaggtttacacaactaaatataaatggctagattttggctaacacttagcagaagcattaagcaaacatggataaattcataaaacaaatgatgaaaaaagcagattgttcttggagtacttctttaaacacttaaccttaaaacacctggtccttagtgagagaacgtcctttattcagtagatcttaacagtacaaggtatagtaagtcctaaaacctttaaaaaattttggcagttgaatccagtagtgctccttgattcaaggaatgaaggtttgtatttcttgcctgctctattcacgaaggactgttaaaagtctccttaaaaatttttaaaaatgattcctatagttgctaggtgtcttgttacttcagaaataaaggcttcatactgagaaactgaaggacacttttctctcacttggcccacatgtcatgtagtgggtaatagaattaggagctttgttgctccctagacctgctttttgaatttctgctttcttgtactttgtccacattagatgctgcagtggtgttgnnnnnnnnnnnnnnnnnnnnnggtgaatcaactgatataggcagtctactgtccttggtcaaaaaatcatggatgcttgtccttcgtgtagttccttcggcagttgagatcacgctgcttgcacgaggtaaagttgcataagggttactatcttttgattgtcgtgacagagaagattcttttactaattttatttttccttgagtgcctggtgtnnnnnnnnnnnnnnnnnnnnnnnnnnnnnnnnnnnnnnnnnnnnnnnnnnnnnnnnnnnnnnnnnnnnnnnnnnnnnnnnnnnnnnnnnnnnnnnnnnnnnnnnnnnnnnnnnnnnnnnnnnnnnnnnnnnnnnacctggccagaccacagctaactggtttgtcttttcccaaaaagtcagaagagacagacaaacttttcattacttcatctaaaagattctcttgacttgaggactttatctgtactgaggtaagcttattgctttcttccaaaaactgttgtagagtaacaacttcacttccaggggaaccagttttgatcttgtgatgtcgactctccagtgtttcagatattttgtgctggagcactgggcttgatctggtctgtcttttcaagtactggattggactgctaccactgctggaccaagcctcatggtcatgaagcaggctaaattctccactgctgtggctttgtggcctgctttggttattaactgcacctgctttgacttcatgtagtgaagcattattattgctattgctagtggatgttctgccactatcaaggctggctggtcttgaagcatgaactcttgatcccgtactagaatcatcactaacaccttgtggacttatgtcttcaaaggatgtagtatctttattattaaccaactgcttggatctgaagcctgcagaagagttgacagttgaaaagttgatggctgtagtagagaaggccatagctcccaattcttttctccttttacccgttgaaatatcatcaggaacctccaaattctcagtactacctgtccactgtcctgctaggaccatggactgcaccaggtcattcatggtgctgcttttcttggtccccaaggtctggccatcttctaaagagtttgaacctactgaagaactatcttgactgtcttgatgagggagctgaagaaatccttcactggagtctgagcgggtgggtgttaatgttagagatttctggcgttcccgattaatatctttcttagactttatcaattttctcatttttagagtaatccagttgcctctccttctaggaggagatgggtcataaaatttgtattgatccataattttctcttctagtttctccttctgacgtcttaattcatttaacttatcaatgtactgtctttgttcaacatgaaaaagatccttgctttccatattctgctccaaaagtgttctgttctgtagcattaatgtctgaatttgatctagtagatgccgattttcttcttctaaatttcctttaagttggcttagcaactcacactggttattcagcttggttgatgtaatatccaattgttggtattgttcctttagttttgaaaattcagcttctaatcttgtnnnnnnnnnnnnnnnnnnnttattcagaagacttttcaaatttttatggtcagtttgtaaaacttcagtctcttttaaaagttgactataggtatgattcagcctatcattttcaccacaaagtttcttgtattctgcagctactgtttcatgatttttattttcaagcagcattttttcctgttctactttgagcattttttccaaatcttccaactgtcctttctgttttaataactgattgtaacggtcttcaaggtctctatgttccacctcaagatttttgtgggcagacttcagagttccatgtttagagataagagattcatactctgaagcctgacgttcatgaagaagttccagcttttcatgatctttgatcagagaatcatagagagattttaggtcttctcgctctttgattacagattcattttcattttctaaggaagactgctggattaggagttgggcattctggttcatgagtgaggtactttgggaattaagggtggaattttcaacctgaagcttggcattctgtgtttgaagagtggtattctgttcttgtaatgacactgtctgcctctgaagtgcaagaatctgagcctgcaaattattgttctgtgtctcaagttgcttcagttgagttttcaacgcttgcttctctgcttgcagtgtagcattatttctttctacttcaacccacgcgtccgcggacgcgtgggaagttctctagtcgtttcttgactttctcgctcccatttgttgtcttcaccagatattggaggagagctctgtaccatcctttcctcatcttgtctctgtttgagagcttcataattttttttcactgttttaagttcttggcgcaattgctggttataattcgtggattcttctaatcgagcttctaaagcagcaattttttcttcttttatttcaagagacttcttaagagtggattctaattttgattccaaaagtttatacctactgtcatcagtactttgttcatcatgtaagagtcgctccttatttaaccctatcttctcaagctcatgagttaatttttcgagatcattgttcatctgttgggtcttcaacttttcactcaccaaatcctcacgtagtgtaaccaacgtttttatatcaatagttgctcttttcacaagctccttattttctttttctagttctttcagacggacacaagattctttatatataccaatttctttggaatagggttttgttttctttttccaaatttccaatcttcacattattttcttctaatgtggtatctttaatttctgccttgttgtcggagtctcttattttccttctccaattgtt

SEQ ID NO: 7892 - DNA, 8041 bp, Homo sapiens
  misc_feature (672)..(689): n is a, c, g, or t
  misc_feature (1550)..(1566): n is a, c, g, or t
  misc_feature (1967)..(2044): n is a, c, g, or t
  misc_feature (6159)..(6174): n is a, c, g, or t
gggagctcttctctggccggcacccacgcggcatcacgggattgaagaggaacctcacgccactgcctggagctccgccttagccccgtgggccccacggagtgagcggcatgcagcacccccgggcctgtccagtgtcctctggcctgctgccctgcacccccagaaggccctgacgccctggggcacttctgctctgcacaggaccacgcgggggtttgccatggtgacataaaggggcgcggaggaaggaaggagcgtgaccagcctgtggactgcgcccctggctgggaggaaggactgggggcccagatcctccactcccagtgccccacaagggcgtcgcttcctaagtctctgtgaatttgttggtcagtggacgattctcgtgtctcctcctgtgtggggccttggggtagccagggcaggccgggcctccggtggccaaggtctcggaggccaggatgcctgccctggcatgcctccggaggctgtgtcggcacgtgtccccgcaggctgtccttttcctgctgttcatcttctgcctgttcagcgttttcatctcggcctactacctatatggctggaagcgaggcctggagccctcggcggatgcccccgagcctgactgcggggacccgccgcctgtggcccccagtcgcctgctgccannnnnnnnnnnnnnnnnncagccaccccttcccgcacagacccgttggtgctggtctttgtggagagcctctactcgcaactgggccaggaggtggtggccatcctggagtccagccgcttcaaataccgcacagagattgcgccgggcaagggtgacatgcccacgctcactgacaagggccgtggccgcttcgccctcatcatctatgagaacatcctcaagtatgtcaacctggacgcctggaaccgggagctgctggacaagtactgtgtggcctacggcgtgggcatcattggcttcttcaaggccaatgagaacagcctgctgagtgcgcagctcaagggcttccccctgttcctgcactcaaacctgggcctgaaggactgcagcatcaaccccaagtccccgctgctctacgtgacgcgacctagcgaggtggagaaaggtgtgctccccggcgaggactggacggttttccagtcaaatcactccacctatgagccagtgctgctggccaagacgcgctcgtctgagtccatcccacacctgggcgcagacgccggcctgcatgctgcactgcacgccactgtggtccaggacctgggcctgcacgacggcatccagcgcgtgctgtttggcaacaacctgaacttctggctgcacaagcttgtcttcgtggatgccgtggccttcctcacggggaagcgcctctccctgccattggaccgctacatcctggtggacattgatgacatcttcgtgggcaaggagggcacacgcatgaaggtggaggacgtgaaggccctgtttgacacacagaacgaactacgcgcacacatcccaaacttcaccttcaacctgggctactcagggaaannnnnnnnnnnnnnnnncaatgctgaggacgctggggatgatctgctgctgtcgtatgtgaaggagttctggtggttcccccacatgtggagccacatgcagccccaccttttccacaaccagtccgtgttggccgagcagatggccttgaacaagaagttcgctgtcgagcatggcattcccacagacatggggtatgcagtggcgccccaccactcgggcgtgtaccccgtgcacgtgcagctgtacgaggcttggaagcaggtgtggagcatccgcgtgaccagcacggaggagtacccccacctgaagccagcccgctaccgccgtggcttcatccacaatggcatcatggttctcccacggcagacctgcggcctcttcacacacaccatcttctacaacgagtaccctggcnnnnnnnnnnnnnnnnnnnnnnnnnnnnnnnnnnnnnnnnnnnnnnnnnnnnnnnnnnnnnnnnnnnnnnnnnnnnnntcttcatgacgcacctgtccaactatgggaatgaccgcctgggcctgtacaccttcaagcacctggtgcgcttcctgcactcctggaccaacctccggctgcagacactgccccctgtgcagttggcgcagaagtacttccagatcttctccgaggagaaggacccgctctggcaggacccctgcgaggacaaacgtcacaaagacatctggtccaaggagaagacgtgtgaccgcttcccaaagctcctcatcatcggcccccagaaaacaggcaccactgccctctacctgttcctgggcatgcaccctgacctaagcagcaactaccccagctctgagacctttgaggagatccagttttttaatggccacaactatcacaaaggcatcgactggtacatggagttcttccccatcccttccaacaccacctccgacttctactttgagaaaagcgccaactactttgattcagaagtggcgccccggcgggcagcagccctcttgcccaaagccaaggtcctgaccatcctcatcaaccccgcggaccgggcctattcctggtaccagcaccagcgagcccatgacgacccagtggccctaaagtacaccttccatgaggtgattaccgccggctctgacgcatcctcgaagctgcgtgccctccagaaccgctgcctggtccctggctggtacgccacccacatcgagcgctggctcagtgcctatcacgccaaccagattctggtcttggatggcaaactgcttcgcacagaacctgccaaagtgatggacatggtgcagaagttccttggggtgaccaacaccattgactaccacaaaaccttggcgtttgatccaaagaaaggattttggtgccaactgcttgaaggaggaaaaaccaagtgtctgggcaaaagcaagggccggaaatatcccgagatggacttggattcccgagccttcctgaaggactattaccgggaccacaacatcgagctctccaagctgctgtataagatgggccagacacttcccacttggctacgagaggacctccagaacaccaggtagccgtggccaccacagccagactgaacgtttgtgaaagctgggacatcccaccacacgctgagccagacctgcagagtgggaagctggaccagggcagctgcgcacttatgagcaatactctgtggaggtctggtggggctgggggagcacccaggcggatctgcaagcacctcggagcacccaccgctgggtctgcggcctaagggacctccctcgccagcagaggtccattccgttcccagctgctcctggggaggccgcttcctggtaggagggagtccacgagactcttttctgtccctcactgtgttccgccgactgtcccctctcgtcacccatcactccctgcttccgcagggcgcccctcagtattcgctgccatatgtccctgtcctccaggctgtaggggaggagagcctggccgggggagacagactggacatttccctgtttcgagccaggctcttccaaggggccagctgggtccccggagtcagtcctaggctggatgggagggtggccccctcaagaggactcccagcctccacatctggttcctaccttcacatctcaccctcccgttctggggaagaatttctggttcctacagtatccactccatcctcaaggcttcccgcagggccttggggcactgccttgccatcgggcccagttctccgggccccacctgcacccctttcttccccctgggatatgatgtgtggtgtttcctgtggtaaaagactgaggcaggccaggggtctgccagtaacatgttcccatgtacagacacggtccccacaccctcccagcctcaggcccaggcagacatgggcgagctggtgagactgccagccacggctttgcttagccacctgtggccgagggctctcagagacccccttaacctcccaaatactaagaagctaaaatattttaatattttgtttttttttttcttggtgccagagtttataccctgggtgctggggtcgcactgtgttatatatatatatatatatatatataatgtgtatatatatatattctattttttttggttgggttcgtttttaattcagtcctacaaaatggtggtaagccccagtctcaggggtcaccctgtcttagagctagagatgaggtggcagggagggaggctgtgtcctcagtggcctggggctgagcagaccttaggaagggaccctccccagtgccgtggctgctctggggctaccccaggtgaacagaggtggtgagatgcgcagggaagaccagctctctccaggacatcgggctgcgtgaagtccagtgaccctgaggggattttggccaaaggaaacagccagggctgggctaggagagctagggtcaaaagctgccccacccactctccctcacatggtgctaggctgggagctgccctgagagctgggatgcccaccaaggcccacagaactgtctccaggcccttgtagacagtgggatctctgggctgatttctggttggggtctgctcctaccccaccccatttaacaatgtgaagtgactgaggctggggtgcctctccctggccccctccaactgccaaattctgcttccctctgaaccccaggaaatactttctggagaggcttgtcttgttcagaagactctagcatcttggggctggaaggtcctttgacgggtatgaaacaggtccagaaaggggaggtggcctgcttggccgacgtcatggagccagctgggagcagggctgagcgttgaacccgaggctcccggttccaagtcccatcgtgctcctcttccaatgccacactgcctctgagcccatccttggaccctactctgtgccaggttcctgtcccttcctccgtcacagcatggtcattccaggatatgggacaaaccactccttcccagccagggtgcctttgagccttctcattccgaggtctgcgtttgcatccctgtcgtgttctccctcgaggggtccttccccagcctgtgggggcctgggtctgttctgagctgattcccttttctccagttctctgctgggatgaagaaagttggacactcagtgggaccagctgcaggtggtttcactgtgtacacagcagtgtccccatcatgcctctcaatggggcctgcaagcctgggaacttgggcatcgttgggccagcaggatgagcagcaaagagtctgaggacagggtggcatgtctgcttgtgtgctcatgaagacatgcccacgccatggagccaggggcttacagagaggggcagtgacttccagagtcccatccgtcagtgaggggactgggctgcgggatgggtgaggatcttacagctcccaggttcggaaatctaccctctaggcctggaggcctctctcgcagagcatggaaggcaggagaggtgggctggcctagggcaggagctccacttctctctgcctctggctatgggaaggagcaggcggttggaaatcctgtgacaacagagatcttctggatttttgcctggacccttctgcaagcctggagactggacctgccacatgttccaagtctgtctgcctaggtcactgctgccacttctcctcccactaacagacctttcttgaagacccactaggtccagacactgccgggacttgcaggtatggggggtagaaggagaggcagataagctgcctggggggctgttagctaatgggtacaaggacaccccctcccgagaagagaagccacagatgagtgggccagcgaggccagtcttcaatgtccactaattcactctaagcatttggccaaaaaaaggagagagaaataactgaaattgttcaggtggctccatcgtctattctgtggtcccctccatgagcctttgccccagggtgggtgcaggtgcgagtgtcacctgcagctgcctcagtcattcagagttccagagccttctgtggtggagcatcctgctgcttggaggatgagtctgaagtttaaaaatgggccttttctgagcccccctgatgannnnnnnnnnnnnnnnggcccagctaaggaagccatctgttcccagcagaggagagctgctgcgctgacctgcagaggttggtggtcccagcacagagctgtgcccatgggcttgttagtgggaaaagcaaatacaacaatgttttaccaaacatttaattatgaatgcccactccccagcatctagatctaaaattattaacattttgccacattctttttctctctctgtgtatgtatatgttttctctgtcctaatttaaaagtacattgcaaacatcatgaaacttgatccctgaaagcttcagcctgcatctcctaagagttagggcattgtcctacacgttggcccagtatcacagccaagacgagaagtcatttcccagcgatgtctgctatctaatctgtattcaaatccccccaattgtctcccaggtaacttatgtgtctggttttggaatcagcatccagtcacggtgcacacattgcattttctaactatgtttttaaaacctctttgaatgctgaaaggtcttccctcagctcactttgagtttttaaatgacattgtttttgaggccctaggcctgctgtctttttgaagccccacattctgaatttgtcagattgtttgctcatggtgtcgcataaccacttcttctatcccctgtactttcaaggataatttaggctacatgagattttgccttttgtgctgacttgacagcttcacttctgcctaagatgcgcctccactgtcacctgtaccaagtgccaaaacagcagaggggccagttagagcaagagctctgggggggccggaaagtctccctggagaaggccgtaatatctgggccttggaaggaaggacacagggctctggaaggaggaggctgcatgcctgaaggctgggccttcgaccctggggatgggccacagggcaccaaacacatcatatgtctctctctttctattttggggtcccagggttttcatttcctggagacccgtggtctgtgtgcactggagcagagccaggctctcagttgcagcagggaaaagcctacatggggaactgcctcccgcaagctgtggtgtgagaagagccctggctggcagcaggagctgtgaagtttcatcccagccgggtgcatttagtagctgcctgaccatcttcctcccaggccctcagtttcttcatctgtagaatgagcagataggggccacagcagggattttcacacatcaaaggaggcagcctctgctctagttgatgtgaggatgagggggcggcctagaccccctgctgcccaggccgttgaggcaacactgggttcctggcttgacagctgtgggctggctgcccttgccagctcagacggctggcgagttttcagcttccctaagggactggcatagggttttgtggggtcaatgccaggaacctgggggaaactggatgcgttttatcctaagaagttcatccctcctgctcttactgtttccggccctggaggagaatgagggaggagagggttttctatgactgtgttagcttttattattagcaagagggctccttttgtaatttgtgcatgaaattcatgtcatttcctgggagaggagagggccgactggagagggtggggggcacactggggaagcaggcagaggtttccttcccttgtaggggggtggggagagtggggagagggggtgctatccagttcgcctgatgagggctctcgaaccagccgttttgggttgtgttaaaggtgagaccttcctccattaatgtacaatctcgaactaactgctaataaagtggggttctgtttgtaaaaaaaaaaaaaaaaaaaaaaaaaaatagagatatagaacta

SEQ ID NO: 7893 - DNA, 1471 bp, Homo sapiens
cccaagtctctctcgtgcgcagagcccaggctgcgcttccctggtcaggcacggcacgtctggccggccgccaggatgcaggccccgcacaaggagcacctgtacaagttgctggtgattggcgacctgggcgtggggaagaccagtatcatcaagcgctacgtgcaccagaacttctcctcgcactaccgggccacaatcggcgtggacttcgcgctcaaggtgctccactgggacccggagactgtggtgcgcctgcagctctgggatatcgcaggtcaagaaagatttggaaacatgacgagggtctattaccgagaagctatgggtgcatttattgtcttcgatgtcaccaggccagccacatttgaagcagtggcaaagtggaaaaatgatttggactccaagttaagtctccctaatggcaaaccggtttcagtggttttgttggccaacaaatgtgaccaggggaaggatgtgctcatgaacaatggcctcaagatggaccagttctgcaaggagcacggtttcgtaggatggtttgaaacatcagcaaaggaaaatataaacattgatgaagcctccagatgcctggtgaaacacatacttgcaaatgagtgtgacctaatggagtctattgagccggacgtcgtgaagccccatctcacatcaaccaaggttgccagctgctctggctgtgccaaatcctagtaggcacctttgctggtgtctggtaggaatgacctcattgttccacaaattgtgcctctatttttaccattttgggtaaacgtcaggatagatataccacatgtggcaagccaaagatctatgcctctgttttttcaatgagagagaaatagcaaatgttctttctatgctttcctcaccatcatcacagtgtttacaaacttttgaaaatatttagtctgttacaaacttctgtcatgtagctgaccaaaatcctgcagggccacagtcggcactgttatttgcttcttttaatcagcaaaggcctcaagtcttaaaataaaaggggagaagaacaaactagctgtcaagtcaaggactggctttcaccttgccctggtgtctttttccagatttcaatatattctctgatggcctgacaggcctattaagtagatgtgatattttctcccaagatgacctccattctcggcagacctaagagttgcctctgagttagctctttggaatcgtgaacacaggtgtgctatattgtccttgtcctaactgtcacttgccatggcctgaatgttggcttaactgaatattgtatgaaaagacatgcctccatatgtgcctttctgttagctttctctgactcaagctgtggggctcctctatacatgctatacatgtaatatatattatatatatttttgcaagtgaacaataaaacattaaaagataaaatttccctatttaaaaaaaaaaaaaaaaaaaa

SEQ ID NO: 7894 - DNA, 2456 bp, Homo sapiens
aatggaggagaaaaggatctttcatccagcattcagtcagtggcctctgcctggagacaaagcctgcccagctggtgaccagcaagtgtcaggctgacgcccaggcccagcagtggcagctgttgccacacacatgacggtagccctggggcctcctgtaccttttgcatgagacttcgggaccggaagggggttagggtgggggagtgcaaagtgggctgttcccatctcctcacatttctgccaggaccatcagcaaatacccaccatgacacacgttctccaaagcttgttctaggagggcgcaggcgggcacgccccgatgccctcagtgctgtcctggccttgccccgggagaggagatggtcagggtgctggactgttgctgggtagagactgagtaggtgcccctggccctttgtcctctcccttggcgcttcttggggctgggacaatagtgtgtggtctctcccttgttgcccggagaaagcaaggacagaagcccacacaggggtcttttgggtcatgaggcccagctgtgcaggcaggcagggccaggggaaattgggcagcatggatggagaggctgaaggctgggaagagggaaggggagaggggcagcctgcaggggtagctgaagaacaggaaggaggtgagaagcccggtgacctgtcagagatgccaagcccagggtggcactgggttgggtggggacggatggtgtcttggcagcaaaggatgggtaatttgcaaatgaacatggatagaagagcagcaaagcaccaaaagaacaaggtctcttacccaggacacagtcccttccacactttaccagccccagggtctgagcccgacgctgcctcttccggtcctgtgcctgtgggtgcccacattcttagcaagaggctgcagagggatctttaggggaagattcgggcgtagtttattaaacagactccacttctatttggccatgtgtcaggctgagacctctctctcgggcattaatgagcagctagtgccctgtccctgccgccaggacccactgaaaggacgggtagccacacacatccctgagtagtcccagcctcatttgtcatttttgactcctgctttctcaaaggtttttgcctctgtcaatacagcatcatgggtggttggaaagaagggaacttcccttctggaccaagaacagcccctaagtcattagggttcaacctcacccttattcccctccccgctacaggagcccctaagtcattagggctcaacctcacccttattcccctccctactacaggagggattttcttgaagggtcagctattgcactgtgctgggaggctggctgtggctcctgtttgtgaagagaactcccagttccttttcacagccgctgagaacacatccacacatctaccccacggccttgtcttggaactgctcctgctatccccacaccctgcttcctcaccccactggctcttgggcaaatgactgttggtaccaggaccctgggggtctcccctacaaagcagaccagcctggggcagatatacctaccacaggagccccctgtctttcataggccaaggatccacatacccatagagttcatggattctagagggtctaggaatctcttgaaattgtccctaaaatactgcatgtgtgtgcatacatgcattttcctggggaaaaagtccatggcttctaaaagaggtccctgatccccaaagggcctgaacctctgctctggattgaagccactgtctgcccaagctgccaccccctaatcttcctccctggcgtgctcaaactgccatcgcctgctccctccacacggcccttggggtcagcagccaagtgtctgtggtccgcagcacctgctctggagggctctccagcagtttcgcctcctgactctcaccagcgtcctctcggcagcactcccgtgcccaagtgcacccctctggacttgccagcgcaggccccttcgctcccagggccatgctttgcctgtcctctgtcgtgatgtttcttccgcagccaggtgcagcctcagatcccctgttcatctgggaagcctcctgccacagcttaggacagaactgggcccagggcaaaggcctctccccagaggatggactagaaggcctgggccacactcgggcatggacctttggggctggggagccggggctgcgcctgttgaatgtaagaggactgctgaccagagggccttcaagagggtctctctgtcctttgctgtggtcagatcaggctctgcacttatcagccggtcctttgtggcaacgcagccctgttctgtttttgcttttcctcttcttgaccaaagcatgtgccactagctgtccttgaggacctcgtctttatgaaacacacacctggaataaaaccacttcttacatgtccaaaaaaaaaaaaaaaaaaaa

SEQ ID NO: 7895 - DNA, 3883 bp, Homo sapiens
  misc_feature (1425)..(1425): n is a, c, g, or t
  misc_feature (1449)..(1449): n is a, c, g, or t
  misc_feature (2122)..(2164): n is a, c, g, or t
ttgtgtcgccatggcggcggcagcggcgacgagaacggcgagcgaggggtcgagcgcggccggggcctgaggaggctacgcgaccatggtggcacgcagcactgacagcctggatggcccaggggagggctcggtgcagcctctacccactgctggggggcccagtgtgaaggggaagcctgggaagaggctctcagctcctcgaggccccttcccgcggctggctgactgcgcccatttccactacgagaacgttgactttggccacattcagctcctgctgtctccagaccgtgaagggcccagcctctctggagagaatgagctggtgttcggggtgcaggtgacctgtcagggccgttcctggccggttctccggagttacgatgactttcgttccctggatgcccacctccaccggtgcatatttgaccggaggttctcctgccttccggagcttcccccgccccccgagggtgccagggctgcccagatgctggtgccactgctgctgcagtacctggagacactgtcaggactggtggacagtaacctcaactgcgggcctgtgctcacctggatggagctggacaatcacggccggcgactgctcctcagtgaggaggcgtcactcaatatccctgcagtggcggccgcccatgtgatcaaacggtatacagcccaggcgccagatgagctgtcctttgaggtgggagacattgtctcggtgatcgacatgccacccacagaggatcggagctggtggcggggcaagcgaggcttccaggtcgggttcttccccagtgagtgtgtggaactcttcacagagcggccaggtccgggcctgaaggcggatgccgatggccccccatgtggcatcccggctccccagggtatctcgtctctgacctcagctgtgccacggcctcgtgggaagctggccggcctgctccgcaccttcatgcgctcccgcccttctcggcagcggctgcggcagcggggaatcctgcgacagagggtgtttggctgcgatcttggcgagcacctcagcaactcaggccaggatgtgccccaggtgctgcgctgctgctccgagttcattgaggcccacggggtggtggatgggatctaccggctctcaggcgtgtcttccaacatccagaggcttcggcacgagtttgacagtgagaggatcccggagctgtctggccctgcattcctgcaggacatccacagcgtgtcctccctctgcaagctctacttccgagagcttccgaaccctctgctcacctaccagctctatgggaagttcagtgaggccatgtcagtgcctggggaggaggagcgtctggtgcgggtgcacgatgtcatccagcagctgcccccaccacattacaggaccctggagtacctgctgaggcaccntggccgcatggcgagacacagtgncaacaccagcatgcatgcccgcaacctggccattgtctgggcacccaacctgctacggtccatggagctggagtcagtgggaatgggtggcgcggcggcgttccgggaagttcgggtgcagtcggtggtggtggagtttctgctcacccatgtggacgtcctgttcagcgacaccttcacctccgccggcctcgaccctgcaggccgctgcctgctccccaggcccaagtcccttgcgggcagctgcccctccacccgcctgctgacgctggaggaagcccaggcacgcacccagggccggctggggacgcccacggagcccacaactcccaaggccccggcctcacctgcggaaaggaggaaaggggagagaggggagaagcagcggaagccagggggcagcagctggaagacgttctttgcactgggccggggccccagtgtccctcgaaagaagcccctgccctggctggggggcacccgtgccccaccgcagccttcaggcagcagacccgacaccgtcacactgagatctgccaagagcgaggagtctctgtcatcgcaggccagcggggctgaactgctgggggctgggggagcacctgcctcagccaccccaacaccagctctcagccccggccggagcctgcgcccccatctcatacccctgctnnnnnnnnnnnnnnnnnnnnnnnnnnnnnnnnnnnnnnnnnnnggagatgtgcagcaagctccggggagcccagggcccactcggtcctgatatggagtcaccactgccaccccctcccctgtctctcctgcgccctgggggtgccccacccccgccccctaagaacccagcacgcctcatggccctggccctggctgagcgggctcagcaggtggccgagcaacagagccagcaggagtgtgggggcaccccacctgcttcccaatcccccttccaccgctcgctgtctctggaggtgggcggggagcccctggggacctcagggagtgggccacctcccaactccctagcacacccgggtgcctgggtcccgggacccccaccctacttaccaaggcaacaaagtgatgggagcctgctgaggagccagcggcccatggggacctcaaggagggggctccgaggccctgcccaggtcagtgcccagctcagggcaggtggcgggggcagggatgcgccagaggcagcagcccagtccccatgttctgtcccctcacaggttcctacccccggcttcttctccccagcccccagggagtgcctgccacccttcctcggggtccccaagccaggcttgtaccccctgggccccccatccttccagcccagttccccagccccagtctggaggagctctctgggcccccctgcaccactcgacaggggagagaacctgtactatgagatcggggcaagtgaggggtccccctattctggccccacccgctcctggagtccctttcgctccatgccccccgacaggctcaatgcctcctacggcatgcttggccaatcacccccactccacaggtcccccgacttcctgctcagctacccgccagccccctcctgctttccccctgaccaccttggctactcagccccccagcaccctgctcggcgccctacaccgcctgagcccctctacgtcaacctagctctagggcccaggggtccctcacctgcctcttcctcctcctcttcccctcctgcccacccccgaagccgttcagatcccggtcccccagtcccccgccttccccagaaacaacgggcaccctggggaccccgtacccctcatagggtgccgggtccctggggccctcctgagcctctcctgctctacagggcagccccgccagcctacggaagggggggcgagctccaccgagggtccttgtacagaaatggagggcaaagaggggagggggctggtcccccacccccttaccccactcccagctggtccctccactctgagggccagacccgaagctactgctgagcaccagctgggaggggccgtccttccttcccttcaccctcactggatcttggcccaaccaaatcccttgttttgtattttcttgaaccccgaccactaccccaggtttctaactttgtaacttgcttctgatgtgggtccctaacctataatctcagcttccctaccctggactgaagggtctgcccatccccccaccaccctccatcctgggggccctcgcacaaatctggggtgggaggggctaggctgaccccatcctcctctccctccaggagcccccagcatgtcctgacctgtgcacggggatggggggacaactcctacccttctttccccacatgccccactaaaccatctgacaacattaatgaataaaatggtgaaaatgtgaaaaaaaaaaaaaaaaaaaaaaa

SEQ ID NO: 7896 - DNA, 5990 bp, Homo sapiens
  misc_feature (11)..(65): n is a, c, g, or t
  misc_feature (643)..(658): n is a, c, g, or t
  misc_feature (2061)..(2077): n is a, c, g, or t
gcggccgctcnnnnnnnnnnnnnnnnnnnnnnnnnnnnnnnnnnnnnnnnnnnnnnnnnnnnnnnccgggcgcctgggtcctcacgcccaactgacccgggtgccgcggagccctcccgcggggcgcgcggagcccggtggcggcgaggaccggcaggcgcgcggcacggagccaggcgccccgggtccgagtcccggtcccgctcctggtcccggcgaggacggcgcccccgccgcgggctaccggcgctgggagcgggcggcgccgctggccggagtggcttcgcgggcgcaggtctcgctcatcagcacgtcgttcgtgctcaagggggacgcgacgcacaaccaggcgatggtgcactggacgggcgagaacagcagcgtgatcttgatcctgacgaagtactaccacgcagacatggggaaggttctggaaagttctctgtggcggtcatcagatttcgggacgtcctacaccaagctcaccctccagcctggtgtcaccaccgtcatcgacaatttctacatctgcccgaccaacaagaggaaggtcatccttgtcagctcctcactcagtgaccgggaccagagcctattcctcagcgcagacgaaggcgccacctttcagaagcagcccattccnnnnnnnnnnnnnnnnctgattttccaccctaaggaggaggacaaggtcctcgcctacacaaaggagagcaagctctacgtgtcatctgacttggggaaaaagtggacacttctgcaagagcgagtgaccaaagaccacgtgttctggtctgtgtctggggtggacgctgaccctgacttggtccacgtggaagcccaagacctcggtggagattttcggtacgtcacctgcgcaatccacaattgctccgagaagatgctgacagccccattcgcaggccccattgaccacgggtctctgaccgtgcaggacgattacatcttctttaaggcaacatcagcaaaccagacaaaatactacgtctcttatcgtcgaaatgaatttgtcctgatgaagctgccgaagtatgcattgccaaaggatctgcagatcatcagcacggacgagagtcaggtgttcgtggcggtgcaggagtggtaccagatggacacctacaacctgtaccagtcggacccacggggcgtgcgctacgcgctggtgctgcaggacgtgcgcagctcacggcaggcggaggagagcgtgcttattgacatcctggaggtcagaggggtgaaaggagtcttcctggcaaaccaaaaaattgatgggaaagtgatgacgcttataacctacaacaagggccgcgactgggattacctgaggccacccagcatggacatgaatggaaaaccaaccaactgcaagcctccagactgccacctgcacctgcacctgcgctgggcagacaacccctacgtatcaggcaccgtgcacaccaaggacaccgccccaggcctcatcatgggtgcaggtaacctgggctcacagctggtggaatataaagaagaaatgtacatcacgtcagactgtggtcacacctggcggcaggtgtttgaggaagagcatcacatcctgtacctggaccacggcggcgtgatcgtggccatcaaagacacctccatccctttgaagatcctcaagttcagtgtggacgagggcctcacctggagcacgcacaacttcaccagcacctcggtgtttgtggacgggctgctgagtgagccaggggacgagacgctggtcatgacggtctttggccacatcagcttccgctccgattgggagctggtcaaggtggacttccggccctcattctccaggcagtgcggcgaggaggactacagctcctgggagctctccaacctgcagggcgaccgctgtatcatgggccagcagagaagtttccggaaaagaaagtccacgtcctggtgcatcaaggggaggagcttcacgtcggcgctcacgtcccgcgtgtgcgagtgccgggactcggacttcctgtgcgactacggatttgagcgctcctcctcctcagagtnnnnnnnnnnnnnnnnntctgccaacttctggtttaacccattgtccccgcctgacgactgtgccctgggccagacctacaccagcagccttgggtaccggaaagtggtgtccaacgtgtgtgagggtggggtggacatgcagcagagtcaggtgcagctgcagtgccccctcacgccgccccggggcctgcaggtcagcattcaaggcgaggcggtggccgtgcggcctggagaggacgtcctgtttgtggtgcggcaggagcagggtgatgtcctgactaccaagtaccaggtagaccttggggacggcttcaaggccatgtacgtgaaccttacactgaccggggagcccatccggcaccgctacgagagccccggcatctaccgcgtgtccgtcagggcagagaacacggcaggccacgatgaggcggtgctctttgtccaggtcaactcccccctgcaggccctctacctggaggtggttcctgtcattggcctcaaccaggaggtgaacctcacagctgtgctgcttcccttgaaccctaacctcaccgtcttctactggtggatcggccacagcctgcagcccctcctttccctggataattctgtgacaacgcggttttcggacacgggcgacgtgcgtgtgacggtgcaggccgcctgtgggaactcggtgctgcaggactccagggtcctccgtgtgctggatcaatttcaagtcatgcctctgcagttttccaaggagctggatgcctacaaccccaacacccctgagtggagggaagacgtgggcctggtggtcacccggctgctctccaaggagaccagcgtccctcaggagcttctggtgactgtggtgaagccggggctgcccactttggccgatctgtacgtgctcctgccccctcccaggcccacaaggaagaggagcctctcgagtgataagaggctcgccgccatccagcaggtgctgaacgcacagaagatcagcttcctcctgcgaggcggagtccgggtcctggtggccctgcgggacacaggcacaggtgctgagcagctgggcggcggtggcggctactgggcggtagtggtgctgtttgtcatcgggctcttcgcagcgggagccttcatcctctacaagttcaaaaggaaacggccaggcaggaccgtgtacgcccaaatgcacaacgagaaggagcaggagatgaccagccctgtgagtcacagtgaggacgtccagggcgctgtccagggcaaccactcaggcgtggtcctgagcatcaactcccgagagatgcacagctacctggtgagctgatgccaccccagcatctgtcttttcacccacggagggcacagaaccaccagcaaagccggcggctggactggcgcccctcagagacctgcggaaagccccctccctgagtcgtcgccacaccaggcgacaggcaccaccccctctgataaatccaagcccgcccaggcccacggggggcccacgggaccccccgggactccccggacatggccctgcccctatgggacaccaggcctgactcaggcaggttctgccccccagaccccacacacggccgccccacgtgctgtcgctcagcccgaggcctgacttctctgggctgaggctggtcgtcctggagccctcccagtacctcgggctgcaagagctgcagacccgttcagacactgcgttgcgggctccttccccgcagaggccggggcctccctgactttgcttcttcactcccacctgtgcggccacccagtccctctgtgggagcccgggtgccaggccctcccaacaccacaccaccctccaggcccccctgccctccggctggaaactgcagctctgtaaatgcctctctaggtagctgctggcggtggtgggggtgtctcactctctgtctttatagccggcggtagccaccggggtggctctgtcagagttccgtactcgggagcccctttccctgagtgcccagggtgtctcctctgcccagaggggcagcagctctccctggttctccccagggcagacggggtagggcgggctcaggacccagtgcccatggttcctcactcctaccagcaagcagcaccatcccgcaggcttctcccacctgatggctgttctcccaccgggtctgggctctggaaggagccagatgcccccagaaaggtgggtggtggagacggcaccagatgtaccagttttctgcagttccttataggcgaagggaaccgggtggaaaccaagctgggagaggctgaggatggcagggctggaagggccatcagcgtgaccctcattttcaagaaggggaaactgaggcccagggaggagagtaactgaaggtcacagcacggtcacagcagaggtggccgaacccagccctctgcgcgccagtgctgtgcggtctccacacccttacggtttcctagaatcagggatgttagtgtaagtctataggaatataggggggtgggggggtcaccttttgccttgaaatgggaagtcagtagccccttcctcctcctccctcctccccctcctctctggcagggatctcagatgaccgtggcctccctctcagagggggagaacgccagagccctggctggtgatgtgctggctgggggtgaatcccaatgagggtccctctcagagcgggagaacgccagagccctggatggtgatgcgctggctgggggtgaatcccaatgagggtccctctcagaaagggagaacgccagagccctggctggtgacatgctggctgggggtgaatccgaatgacagtgcagacgttctcccatccaccatgtctgagcttgggggaattgcctcatttcccctggaaaagaaacatggtccattagaggggaaagcccaggggtgaatcttcacgccccaaacagtgcccggtggggaggaggcacccgctccttgttgagtaaaaccacccatggagactggaacctcatctccctgggtcggggggtgttcaaggccacaggacaaggggagcaccctgggccacacaggcgtggaggtgtccccaccccttccacctgtcccccagacccaaagctctctccccaccctacctgcccacctggggctcctgtgccccctccccactccagaggccaccctacaagttgtcctcaaggtcatcctggagatgggatccaggacgtggggccatgactctctgggaccttgccacagcccccattcccctgcttgcagtctgcaaggacacctttgcagggattcttgtcctgctggccaccccacccacacctgtccctggccagcaggccgcctgcaagcgtcaggcacacagggacagacatggcgagcacagtgcaggcccggggcccacgggcaacatggaaccctgggaactgccctcccccttagctcacagtgcctgcggtagccactctaggtcgttggccttccttgaccactccatttaattctctctgctgtttgggttgggtttttccccttagttatctgtgggtttcctgtattttatgttaatatttctattaagaacatgttgggcatgtggacccaagcacctgggaaggaggtggcatctgagacagcctgatacgttcccgtctgtgcacccatggagatccaggcgtgggcccgtggctgtccctggttgtaaattcgagggtctgcatatctgatgttcaggtagacctgggcgcctgggaacgaggccatcagctgccatgcacataacaaagagacaatgcattccttcttatttttcctttttaaaaatcgatgaatcatttgtgatgcttttaacaaagattaaatgaatttgatcagcttttgccttaaaaaaaaaaaaaaaaaaaaaaaaaaaaaaaaaagg

SEQ ID NO: 7897 - DNA, 2928 bp, Homo sapiens
  misc_feature (1121)..(1156): n is a, c, g, or t
cggacgcgtgggttttttttattatttttagttctaattatgtttaatattggtttgctgctttattgaataatctacatttgcttttaaaaaaaggaaattcacttaactgcatgtcagtcacccaagttttaagtgtacaaatgaaatggaaaacatttattacacaaatttaattacaattctaagaaataaacatgcaaattagatagagttcaatttgcagatgctaatcctcatccttgatcttgttccttcctcccttgattttcagtctgtgcgtcttcttgattcctagggagccaggcagccagaggtctggtttttcacagtcggaggatcacctgggggcatcctgcagaacctctcctcggaaatccacggggaaatggcaaacaggattgacgggtttcacacgctcctcgctagacagagccgctcattaccataaccgtctgcagcgacggcggcgcagcgccccagtcgcggcggcgggacctgccgggacccttgcccgccgcgcacccgcagtcaccgccgagcgggcggccgggccgggacccgcgagtgtgcaccggcggccgggctggcgccgagcccagagcggaccagcagcagctcaagcgctgcggccgccgcctccccgctgaccccgcgatctgaggctgtcagagatgactctggttctgtccatgaatagattctgcgagcccattgtctcggaaggagctgctgaaattgctgggtaccaaacactatgggaggctgacagctacggaggcccaagccccccagggccagcacaagctcctttgcagggagaccggggagctggtcccccactggcaggatcacattacaggggaatttcaaatcctataacaacatccaagatcacatactttaagaggaagtatgtggaagaagaggattttcacccaccactcagcagctgtagccataaaaccatctcaatttttgaggaacgagcccacatcctttatatgtccttagaaaagctaaagtttatcgatgatcctgaagtgtacctccgaagatctgtccttataaacaatttgatgaaaaggatccatggagaaattatcatgcagaataactgnnnnnnnnnnnnnnnnnnnnnnnnnnnnnnnnnnnncccaagagtggtttatggctcaagactgcccttaccgaaaacgaccacggatggccaaagaggaatgtgaaaagtttcatgcctgctgcttttaccaagaatgtggtggccactacctaaatttacccctttctgtcaatgctaatgttggaagtgcctccactgctgcctcctctccctccgcctcttcttcctcctcatcttcctcttcctctccccctttgcctttaccgagttgttcccgccaggtggattttgatgtaggtagtgcatctatttacaagagtgatggccagatacctgccaatgaaatctttgtcactaatgtcagatcacttggtgttcaggaaaaggccaaattaaatgatgagaaagcaaatgatgacaccaacagagatggtggccccctcagccacgaacctgtgggaaatgaccttgcttttgagtgcaaaggccaattttatgattattttgagaccggatataatgaaagaaacaatgtaaatgaatcttggaaaaagtccttacggaaaaaggaggcttcaccaccaagtaacaaactgtgctgcagcaaaggaagtaaaatatgagccatcttctcaccgaactttgaagcatgcacagcatgatcagttagctctcgtaaattttattttgaatggattttgtagttttgtacaacagataaaattatgccatgaacatgccatgtcgttttaatgcctggagagcagattgcgtaaaacatctgtatagcaggaataagcgagcttcttataaatgtggtgatttttaccaaggaaactattgacttaatgcttaaaagtatatcatagttttcttacggaaaagatcagtagatgagattgggggacaatgtgcccttgcaatatttccattgccccccaaggagcctgtcactagctaagaaatttctacatgtttgccagttaattagggagttatttggtaagcaaatcaatataaccagcaaagatacctgcttcttctatatgatacaatattttttttaaataaaagactaaagacagggagctagatgaaatggcttaatggtgctgttaagtatttgtacctaacagtcttgtgtgacagatgaaaataggatgtaacataatgaaacacacctgtctaggggcggcaatcaacagtcttacacagagagggtattccctgcaagtttctggcttgcctgtgatgggtgatgaggcttttagagaggtgttatacagggcgatttttggtgccttacttttatcttaatttttgccaatgtgaaaattaaggataaatcagagttacagcagggatttaacaaacaggacaaaaaaaaaaaaaaaaaaaaaaaaaaaaaaaagtggctctcaaatatgtggttgggaaccgtgtaacctttggaccatatgggtgttccagcctttggaatccgacattctcatatccttaatttcgagatgccccaatgtggcttggggaatttccccgatattttcccaaaagggaatgcacgcgacactgtgcagcagagacgacctcgttcaagaaaaagcaccacacgaggagtgactcgaagacgttatctcattgtcgccacacgtcggtctgtgttggcccgaggagaatgaggagagataaaccaaggggaatagagcgagatacgctcggacacaaggagtaaaccctgtgttcacaagtgtacatttccgggaaaccccccactggaaactgcaccattaacaacgtctactagt

SEQ ID NO: 7898 - DNA, 2422 bp, Homo sapiens
acaagcagaagtcaattgtccggtcccacttacaactcatcaaagctgtgagccagttaatagccgatgctgggattggaggctctcggtttcaacattcgcttgcaattaccaataatttcgccaatggagataagcaaatgaaaaacagcaatttcccagcagaggtgaaggacctgactaagcgtataaggactgttttgatggccacagctcagatgaaggagcacgagaaggaccccgagatgctggtggatctccagtacagcctggcaaactcctacgcaagcactcctgaactacgcaggacctggctggaaagtatggccaagattcatgccagaaacggagatttatctgaggctgccatgtgttacatccatattgctgctctcattgcagagtatctgaaaagaaagggttactggaaagtggaaaagatttgcacagcatccctgctctcggaggatacccacccctgtgatagcaactcattactaacaactcccagtggaggaagcatgttctctatgggatggccagcttttttgagcattacaccaaacattaaggaagaaggagcgatgaaagaggattctggaatgcaagatacaccatacaatgagaatatcctggtggagcagctatacatgtgtgtggagtttctctggaagtctgagcgatatgaactcattgctgatgtcaacaagcccatcattgctgtctttgagaaacaacgagacttcaaaaaattgtcagatctctactacgacattcatcggtcatatctgaaagtggcagaggtggtgaattcggagaagcggctgtttggtcgctactatcgtgtggcattttatgggcagggcttttttgaagaagaagaaggtaaagagtatatttataaagagcctaagctgacaggtctgtccgagatttcccaaagattactcaagctctatgcagataaatttggagcagacaatgtgaagataatccaggattccaacaaggtaaaccccaaggatttggaccccaaatatgcctacatccaggtgacctatgtgacgccgttctttgaggaaaaggaaatcgaagaccggaagacagatttcgaaatgcaccacaacatcaaccgctttgtcttcgagacacccttcacgctgtcgggcaagaagcacggtggggtggcggagcagtgcaagcggcggacgatcctgacaacgagtcacctgttcccctacgtgaagaagagaatacaagtaattagccaatcgagcacagaactgaatccaattgaagtggcaattgacgagatgtccaagaaggtttctgagcttaatcagctttgcacaatggaagaagtggacatgatcagactgcagctcaaactgcaaggaagtgtcagcgtgaaggttaatgctgggccaatggcctatgcacgagcttttcttgaagaaaccaatgcaaagaagtaccctgacaaccaagtaaagcttttgaaggagatcttcaggcaatttgcagatgcatgtgggcaggcccttgacgtgaatgagcgcctcatcaaagaggaccagctggagtaccaggaagaactgaggtcccactacaaggacatgctcagcgaactctccacagtcatgaatgagcagattacgggcagggacgacctgtcaaagcgcggagtggaccaaacctgcactcgagtaattagcaaagcaactccggccctacccacggtctccatctcatctagtgctgaagtctgagggctctgcagcatcagacccacctctaagagaactttctgaatttgcagctaatctcggggaagagaaagataggtttaatttatttgaagttttcatggtgttaatatttttgtttacctcgctagcttcagaattttgccaacctctgaatttgcacattttgtataatttttttttctttgagcagtgttgatcaagccaggttgaatatttgccatgaaattccagtgaatgtgtagctcaaatgcaaaccctaagtttgctgtcagttattgtatggtcagtaccccagtcctagtacacatattttaaaggttaaagtgaatgtttttgtaacatttaagcatatttcagatgtaaataaaagattgtaaaatatacggtttttaccaaatttaaaagatcctttttagttaatactatgacagtactaaaaatatatgaataacatttcagataccattatattaaaatatttgtgtatgtgtacaaaagcgttgataaatactaatctttaaagtttgtggagttcctttatttgtaatatatgtgctcttaaaagcaatgggatgtgaaattatgaaagtattttattgttcatagaaataaaaaacacagttactttgcaaaaaaaaaaaaaaaaaaaaaaa

SEQ ID NO: 7899 - DNA, 947 bp, Homo sapiens
  misc_feature (2)..(2): n is a, c, g, or t
  misc_feature (14)..(14): n is a, c, g, or t
  misc_feature (24)..(24): n is a, c, g, or t
  misc_feature (62)..(62): n is a, c, g, or t
  misc_feature (70)..(70): n is a, c, g, or t
  misc_feature (83)..(83): n is a, c, g, or t
gnggtaagtggacnccgggttccnagccgcgttaaaccgccgcaggccagctaattaccccncctagggnataagctgcggcncactttttttttttttttttttatctcccaaataaactttattttgaaaagaatatcacaatatagtcatgtaaatttaaatatggcacactgagcagtattgacgcaaattatatagtcatgtaaccatgtttcggtcaatgtacaatatatatatgatggtggccccacagattataatggagttgaaaaattcctgtcacctgctagggatgtcttgatcctgaccctgcataggcctaggctagtgtgtttgtcttggtttttgaccaaaaagtttaaaaattcaaaatttaaatagataaaagcttatataataaggatataaggaaaatatttttgtacagctatgcaatgtgtgttttaagctacgttattactagaagagtccaaaaattgtttttaaataagtttctaaactagaaaatttacagtaagctaaggttagttttttattatttctataaaaattatagaatttttttttttgagacagagtcttgctcctctgtcacccagactagagtgcagtggttcgatcttggctggtctgacaccttgccccctcacaaggatatttcactgtcaatgtattaactgcctcaacaatctcaagcttagctgtggacataccataaatgttacacacgacatcaatacgtcaaataatgggaaaaggacagagtaattggtgcgaatcatggtagtcatcgtaataggcccaaagtatacgactctaaaagtaatccccgacaaatgtagaccagcgattaagaacagaaatgcacgcacttaagagacacaatctcacaaatagaaaaaaactataaaacaattggaagcagctaaaatgaagggtatatc

SEQ ID NO: 7900 - DNA, 1242 bp, Homo sapiens
tgtaatcccagctacttgggaggctgaggcagaagaattgcttgaacccgggaggcggagattgcagtgagccgagatggcgccactgcactccagcctgggcaatagagtgtgactctcaaaaaaacaaagataatgaactggtttgcatttcttttaaagagatgatagaggaaaatatagttttttgtaagaatgtttatctctcttaaaagataatcttttaattttcttcagataacaagttattattattttttaagaaagcaagtttcacgggccgggcgcggtggctcacgcctgtaatcccagcactttgggaggccaaggcgggcggatcacgaggtcaggagatcgaaaccatcctggctaacacggtgaaaccccgtctctactaaaaatacaaaaaattagccgggcgcggtggcaggcgcctgtagtcccagctacttgggaggctgaggcaggagaatggcgtaaacctgggaggcggagcttgcagtgagccgagatcgcaccactgcactccagcctgggcgacagagcgagactccgtctcaaaaaaaaaaaagaaagcaagtttcacatgaataatgctgtgttggaaggctttttgatttaaaatcttttcggatttataacatcctgttaagttttaggagaacccgttttcccagagcagattcaagcttctaaaaataaatgctttcagtagcaggaatggcattgtttaaaaagctgatggcagggtaagcatttgggttagtgttttattaacatatttgtaagtacttgttcattgtggaaatgtgtccttgactaaaaccatacgtggctatggaaaccatgtttgtagttctgaatacacaggttttgtgtgtatttactctatgtattaaattattattgcccttagtttaaagtaaggattacaattggatttaagtagatcactgaatgttattgtttatgaaacttaactttttgtatgctgcttataaacatgatctataaatcagtgcttgggaaaattttactttcttaatctactgatacaggaataaaatatgaacaattaaacaggttgatccttgaaaaaaaaaaaaaaaaaatttgtgactttttttcctcccaaagtgctgagattacaggcgtgagccaccacgcctggcctacttccctctctctgacccctgccacagcacatcctgttcggcgaacgctgggccgtcggagcacatc

SEQ ID NO: 7901 - DNA, 475 bp, Homo sapiens
ttttagtatgactcatttctttttcttcattcctgtcgcacatcttacctcctcctcactttgtgagtcaaacttaccttcaagcaacttaggcaatctctgtgtgtcctgagaaaatgacaatgacaatagcaggattgggaaaccagaaaggcagaacttgccccactgactttattaagttcagttcatgttcagtataacagtttagagcttacagatgttgcgtcgtgaccattgacatttaccaccaacctatgaggttggcaaaacaagtaacatcatcatcatttcccacttagagctaaaaaacctaagatttcagaagattcagtggcacatccagcagcccataccaaacaacaggcggacctgtggtgagatgctggttcctgactccaaaccttaactccttccctggactgaagcctctatcagcaggggtcagagagaatgtggttatgagcatcactaa

SEQ ID NO: 7902 - DNA, 2637 bp, Homo sapiens
tgcacttcccaggccccaccagccgcggctccggctcgtagcccacagcccactgccggcggctgggcgctgccgaggctcggggcgcgcgcagttggcgtctgccagtgccaagactgtgccgcccccacagccgaggcgcgaaagggggacgcccggcctctgggccgctgccttcgctttctcttcgttgttgcgaacgccgtccgctcaggaggcgccccgcgaccggcgcgatgagtgccaacgaggaccaggagatggaactagaagcattacgctctatttatgaaggagatgaaagtttccgggaattaagtccagtttcttttcaatataggataggtgaaaatggtgatcccaaagccttcttaatagagatttcctggacagaaacatatccccaaacacctccaattctatctatgaacgctttttttaacaacaccatatcatcagctgtaaagcagagtatattagccaagctacaggaagcagtagaagctaatcttggaaccgctatgacctatacattgtttgaatatgccaaagacaataaagagcagttcatggagaatcacaatcccatcaattccgcaacatcgctaagcaatatcatctcaattgaaactcctaatacagccccatcaagtaagaaaaaagacaaaaaagaacaactttcaaaagcccagaagcgtaagctggcagacaaaacagatcacaaaggagaacttcctcgaggctggaactgggttgatgttgtgaagcatttaagcaaaactggctctaaggatgatgagtagcacttggaatttgagacaaggaaagagcattctttaaagagtaaaactgggttcaaaatctttcattactattttctggtattgaggcgactttttataaaacacaattttttgtatgtttcttacattaaaaaggttgtaagttgaaagttcatgaagagatcttgttgtattaaattattttcacaaacttgccttaataaaaggtgaaaatgttactgtttagtatactttatgaagcccccttgagcgtttataaatggacaggcatggggaataagaatcagtgttaatttaaatgatcttatcctggtggatgtgctattttcttaaaggagtatgaagcccttttcaaactatcatcccagtggagcggagtactcagtgaacagttactccatagtgcaatccatattaataggcttcttctcttaagtcttcatctcttcttttgcttaattactgaaccgtaaattacttcagagaaatttaaatgctggtatttgaactttatacatgatactttttgtagtttcttttaatttttgaaagatgaactgcttccttttaataaattaatatctatttatacttttctcttgatttgggtcaagatgtttgatcatgagtgctttgagtggtatgtggaataggagaatataaaaacaaatctgccaaatacactagaaagcattttagtaagaaatgctggccctttcttaaaacatttctcttgcatataccaggatgggagtaaaagatgccttaatatttagtttttgtattgttggagacattgattttaataaaatcctatttatctgctgttgtgtgcttttagttgttggataactgaggtctcctaaatggttcaacataaaaccacatttcaagtcttgtttctttttggagtgtcttttcaagtattcaaatgtatttctcaacctgagcatctttttaatcatatacatgggagtcttttaaatgctgaactgttacacatgcttgatttaaaaataataataatagaggaaactattggtctagttgtgccaagaaaagtttctgatgtttatgtgtgatgtacagtgattttgtatatgcgcccagctttaagaacacataaaactattacgtctggtaggaagattgttagtgcctcaagttacacctgtgcagcttgggtctgagttttgatagaacagtaaacatttaaagaagttaagagcagtttgagctgtatccgcggtttttactcgttaactgacttcagctaaatagtttgaattatagagtaagtataattacagcaaaggagttaatctcattttcaaagctgtttctcattttatttcttgaattaatgtagagcaaaacatgttaaaattcaggaccactggaatatggcaacttatgtttcagggttgtgtgtgggtagtatttgtggttgtattggtttgttttttgtttttggagaaacatctgctagtggaataaaatactttgttttgctctgaagagactgaaattgttcaggcttattatggctcatagattacagagaatgatgctagttacatgccaatgaactatttttactctttttatatgaaatgtaaaaatttgtaggggttctggtgatggtggtacctcttattaccttatgtaaaacacttgaacagcctcatcaatattgccgtcatctgtttaacactcccagtatattttctcaatgtctgttacttaaaattttgtggagtgacataattaataagcaataaagtctgaattatacacaaaaaaaaaaaaaaaaaaaaaaaaaatcgctaatcgg

SEQ ID NO: 7903 - DNA, 475 bp, Homo sapiens
acagaaatggtctcgtgcaggtccctcagactttgcggcactgccttgcggcaccgaccaagaggtgcccacagttatccagctcaatgtgatagaatctctttcatttttcttaatgaaggtgaacttaataaaagcaaacacatgatgattgttgatatattttatttctctgagccttctctgccacataatcccactgcctttaactttcttggcctcgttgggcacatgctgtttatttaacatgctgatacgagtgttagagaaatagcacattgctgagccctcaaagaaaagcttcaccctagcaggcccagaaacgaagagaggctgatgatcagctaaagcacgttagccaaaagcattcttaggtgcagtcgtactgagaagccccgcgtgaagtcctgactcagtgttccctgacattaagccccctgaaatgtgagcaaaaaaaaaaaaaaaaaaaaaggac

SEQ ID NO: 7904 - DNA, 3745 bp, Homo sapiens
cagtgggagacagggcctctggtgcagttcccaaaatgttcctcgccctttctccgtggtcaccattcataattcatgttcgctttaatgagttacatgcttatcagccacaggccattaccacccttatggatgggtctggggggcgacattcctggccaaccccttgtaggaaggaccagataatacccaggaagcaagtagctctaattttaacttcacaggaagtctgtgcatcctccttcatttcagcagggaaaactcctgtggagtgggccctatctggggcatttacaggcttccagctgtattccatccctggaagctgatacctttctatagagtccttttatgagagctcagtgggaaggtctgtcaagaaattcaggttcttgtacagacaaattcatgcaaatttctattattttcacaaaaaccagaaaccatgggggaatccaaagacttgaagtctaaagatggtggcttttaaaacatgcatattccaaaaagaattcatttttgttttgggtttggctagattctcttatttatccccttttagcttaagtattagtttcattctactgaaatgatggagagagggcctaaggttactaggtaattgagctgatggtgcagggagaattgttgagaaaggaagcctagtttccagaagcctgacacagagctacttcactgtcctctactccttaacaaggtaactggagcctcttgggtgtcaaacaagcaccctggaaggcacagggaagcatcagcaaccaaggtagtctctgccctctgtaacttacgtgttggtgcatcagaatctgaattggaacctacctgatgggcccagtggaatagcttttctggggagtggaaggcgtccttgatcacagagctttgctgtcgaatcctggagtcctgcaacatggtgatgcctcagtagttggtgatcctgatcacctttggtggcttgttttagtggaaagagcaagggactaaaggtcaggagacccaggacccagtcctgaagctgcaaaggttagatctcggcctaactttctgttcattgcccccaatttgtctggcctgtaaaatgaagggggagggttgcataaacctaaaactattctggttttgttatacccatagggttgggggtagggatgggactgcccattgctggcaaggaactgggaacagtagcaagcatggtgagggctggagagctggctgggggggttctctcctgttcaaagaagctttcaccatgggcttcattatcttgtcagaagtgaattagtttccaccagggacccctttatcccaaacagcaacacaaaatacaccctaaacctcagagtaaaattgatgtggggctatcctttggctatcgggtcatctgtgctgctccccactcatttctgatgggtttgcaaaggtgccttttgccagggcaggacatagtatgcacatagggatattgttatgtgcctaggtttcaggcactccttctgtaggggaaaatgggaggagccttcctccaccctgatccttaggaacattcctctggcccagggacagcttgttcttctcaccaaacaggtgaagcctgcagtccaaggtgcctggagccagaggtcggggagtaagcacagctgcccctgcctgagaaggagcagcttgcaaggggagccggtggagggaaaggggtacaacagctttggaatacattctggatcttgaggaggatcttgtgattttggctgagccacggtcacttccctcgtgaaggacccgccctatatcctaaattctggatccctcaaagtccagccacagagtttgcatgaagcaaaaagcctagtaagtgagaaaggaaaggggccagggatgggagcagtgctgtgctgttatcactgtcttgcttggaatgaaaacatctgagcaccctgtcttcaagcggtacgctctccccttattccagcagggctactttcctcttcactctgatgaggggagctttatctgctttcaaaatggagcacgtcgcactggagtttcgtgccctctcgttaacctgtcaggagccacagggctccataaaacggaatcagtgtctcaatatacatgacctatgttcatagcaatgttcagccatttgggtttgaagaaaaccacattaaagccaagacccgtttggagcgaactgccttgttctttgctgtgtggaaggttctgtccctactgctgaactccagttcctccccaagcaccctggcctcagaaatcctggcttccccaagttagtgctgtctgacctgagccaggccactgcttggtgcctctacaggccactgtgcatgttgagaattgcccaaaaggattagtgaagctcctgaccctggcgaggccataatgaacactgaagtgcacaggccaagggatgtaattgaaaggcatttatttttgtgaagatgctgtaaaattagcatttaaatatcccattcccttctcttggcctcctcctatccccctatggtatttctcctcctctcctcaaggccaggctttttgtgaaaggcattggctcatctttgtcagcgtggtcctgacgttcacctctgggctgctggagaggactgagagatgtgtggtttggtaggaagggggtgtgtgtgggggttagtggggaatcccatttttttgcatcactgtgaggtagcttcaggccctgtccctggagaaataattgctgcgcagaagtcacaggccatactgggcagttctggtacaaacctgcccttattaataataacaataataataataactccatttgcatagaactgtcactcattcctgccagtctgctgtccctaccctggttttttgctggccccaaccactggccttgttgagtatcgatgggccctgagctcttctgtttgcttttggagctcttcagatgctgtcccccctgagaataccctaactctggggaaagagcagccaaaatcccaatacagtaaaactccacacaatcttgttagcaacagtgacccagaaaattttgagaagtccaatttcaccagaagaggcccagggctccctgtggtcacattttctacccagccattcttggcattgcaacctccatttctagctccagttgaattttctccacccagaccccaaaaataaatggatccatgatgataattaagagaagagaaaaaaagatattatttttgttaggacaaaccattgtaggattttagcaatgtgtatctgtgtgtccctcacaccttttcctattctacttttttttcctttttttaaaaatattatgtactatatttttagtctcaaacacactatatattatatatatttaatttttttatatatataaatataaatgttttaaaaagtaaaaaaaaaaaaaaaaaaacaaacgcggcgacccaccacacatacctccaagggaccaagcacacgcagaacccagtaacggacacaggcgacccaaacgacgaccaacataacgcgagcacagaccacacagacacagagccgcacgggaaagcagcaccgcggaacaccagagagaccactgcggagaacaccagcaaaaacagcaaagcaacacagcaaaaaacaaccacgccaagcaaccaagcaccccaagacagaagaaacaaaacacacgcgcacaacgcagcagaaccaaacaccacaa

SEQ ID NO: 7905 - DNA, 2652 bp, Homo sapiens
tgggtggcgatttcggcacgagggttgcttggaggttggcggcgcggggctgaaggctagcaaaccgagcgatcatgtcgcacaaacaaatttactattcggacaaatacgacgacgaggagtttgagtatcgacatgtcatgctgcccaaggacatagccaagctggtccctaaaacccatctgatgtctgaatctgaatggaggaatcttggcgttcagcagagtcagggatgggtccattatatgatccatgaaccagaacctcacatcttgctgttccggcgcccactacccaagaaaccaaagaaatgaagctggcaagctacttttcagcctcaagctttacacagctgtccttacttcctaacatctttctgataacattattatgttgccttcttgtttctcactttgatatttaaaagatgttcaatacactgtttgaatgtgctggtaactgctttgcttcttgagtagagccaccaccaccatagcccagccagatgagtgctctgtggacccacagcctaagctgagtgtgaccccagaagccacgatgtgctctgtatccagaacacacttggcagatggaggaagcatctgagtttgagaccatggctgttacagggatcatgtaaacttgctgtttttgttttttcctgccgggtgttgtatgtgtggtgacttgcggatttatgtttcagtgtactggaaactttccattttattcaagaaatctgttcatgttaaaagccttgattaaagaggaagtttttataaaaaaaaaaaaaaaaaaaaaaaaaagggagaaagcctgttgcgtggaagataaggcggcgcgggaagtggacacagggtgggctggagctcagatctaactggactctcgctcctgctggctggacatggaggatttggaggaagatgtaaggtttattgtggatgagaccttggactttggggggctgtcaccatctgacagccgtgaggaggaagacataacagtgttggtgactccagagaaaccacttcgacggggcctctcccaccgaagtgacccaaatgcagtggcacctgccccccagggtgtgaggctcagcctaggccccctcagtccagagaagctggaggagatcctcgatgaggccaaccggctggccgctcagctggagcagtgtgccctgcaggatcgggagagcgcaggcgagggcctggggcctcgccgagtgaagcccagtcctcggcgggagacctttgtgctgaaggatagtcctgtccgagacctgctgcccactgtgaactctttgacgcggagcaccccctccccaagcagcctgacgcctcgactccggagtaatgataggaaggggtcagtcagggctctccgggctacatctggaaagaggccctccaacatgaagagggagtcacccacttgcaatctgttccctgcatccaaaagcccagcatcttctcctcttacccgatcgactcccccagtccgggggagagccgggcccagtgggagagcagcagccagcccacccacccccatcagatccgtcctggccccacagccttctaccagcaactctcaacgcctgccccggccgcagggagcagctgctaaatcttccagtcaactgcccattccctcggccatccccaggcctgccagccgaatgccactcaccagccggagtgtgccacctggcagaggtgccctacctccggattctctgtcaactcgaaaagggcttccaagaccaagcactgcaggacacagagtgcgggaaagtggacacaaggttcctgtttcccagcgactaaatcttcctgtcatgggtgccactcgcagcaatctgcagccccccaggaaagtggcagtcccaggacctaccaggtaaagagatcaggacagcaagcaagacttcagtagcaaaccactacagtcagtacctggactcgcctctacccagcagaccctgactccagcagattctggcccagggacaggaggaagagatgccaccagggctggtctcccaggagtagagaccatgggaaatggggtggattaggattgagctggagaagacttaaactctctgggttgaaagaagattaggggaaaagaggtcaccttccagcagtgaaatgaacaaatagaagatgagaagtacaggcaagtggtttgtctttatccacccccactgttgtggtcagccccagagaattttatcttcttccttggcattggttcactggacatttccacgtgagcggcctccgtagctaacctccctgccctctgaggagccatcttcctgaatcgcattctctactggactctggcctgcttggagaggtggcagcaggcacctggtcttcagaaattgtttcctgtgaattctgtgactcctaataggccagtttgtgataagcttactctatgagtcttcatttttctaaaataaagtgaatgtatttttaaaaaaaaaaaaaaaaaaaaagggcgggccgcctctaaaagtatcccctcggaggggggccccaaggctttaacggcggtacccccaggctttttcctttgggtaccaaaaggggggggtccccccttaataaagggggagggctcccgataatttta

SEQ ID NO: 7906 - DNA, 3263 bp, Homo sapiens
tcttttgccaaccacttgaagaagtctgcgaaaacgccaaaaaatgcagttcgaaatgacagtgccatttcgctattgcctattttgtccttgattttattctctggcacttttgtctttaatcgtcgtatttttccatctcttgttctcatacccttctactctatttccgtcttacacaagttctttaaccttagtttatttctttgtcagaatcgccaagaagccagttatcaaatagcgagccttctccccccaccttttttttttttttaaattactgtactgatgtttgttagatattgttcgaatagacctggggtggacatcagcactgccattgtcagccctgtgagggttagaagagcttggtgcatattaaacactgaacagatgttagctgttgttgtcttgagcaagttttcttaccattctgggccttaatttctttttgtttaagatggaagtaatacctaatttttaggttgtgagaattatttgaaatgtgaaaaatattgtcagtgggtctgagccgtagtaaacagtaaatagcagctggttacagtagtatccccttaatggggtaggtatacgttccaagacccccagtggatggctgaaaccacggatagcaccaaaccctatatatacttggttttttcctataccgtacatacatacctacctatgataaaacttacaagttaagcacaataagagattaacaataacataatagaactgtaacaatatactataataaaagttatgtgaatatgatctctttccccttctctcaaaataacttattttactggactcacctattttcacaccagattgaccgcggataattgaaaccggaaagtggaacctcggataagggggtgattactgtatcaccctttaatatgccatctgttagtattcgtatcaccttgtagtcatgtgtagctttcttctacccattctgcaaaattgctttacatcaagtatttactattctttttagcagtttttatccccttctgagttttgttagggattctcttgaggtatatgcaattagctgaagacctactttaatattggattagaatgtttctcctgttttcacacttacaggtttctctggtgtttactcgtttctttgtggaattgcagtttcacctatgcacacacctgtattctttctctttaagaagttacgtgaattgtgtatgttctgttggaaggatggtaaaacttttatctttattcctagaaaaaatgtagaagatttcactggacctagagaaagaagtgatctgggatttatcacatttgatataactgctgatctagagaatatatttgattggaatgttaagcagttgtttctttatttatcagcagaatattcaacaaaaaataatgctctgaaccaagttgtcctatgggacaagattgttttgagaggtgataatccgaagctgctgctgaaagatatgaaaacaaaatattttttctttgacgatggaaatggtctcaagggaaacaggaatgtcactttgaccctgtcttggaacgtcgtaccaaatgctggaattctacctcttgtgacaggatcaggacacgtatctgtcccatttccagatacatatgaaataacgaagagttattaaattattctgaatttgaaacaacatatttttatacttaatgaattgtatctcattaatctcttcccttacatcttcatgtattgttggtttgttttttggttttgggttttttttttttttttttggtataagaacttacatcaaaaggccggtttaaagggaaaggttaatgggctacttaatattatgaacaaaacaaaaaaacaaggctgccacagtggaatattatcttacaagaataagaactacataaaacagatttgtaaaaaatacatatttgaagtattccctgtatttccattattctttatggaatataaagtaagcatgaaaggtagttaaaactttcaggtgcctgtagagttataataactgtattttatgccttgcattcacgcaaattcacattggatgtgatttaaaagtagacattctctttttcctcttttaggatatgtttgattattggaaaattaatatggttatttgttagaagtctggtttataaaaaagccaaaagtgatggaatttattccatttgtcttaggaaggcccataatacttgtttttcttacatgtgactagcaactttctccacttaaagactaaatacctctttatatgatgtaaattattctaattcattttaaaatcttttaggtcagcaaaatgtgtgtcttcagtgctttctctaaaaacgttcctttatagctttgtacttttttttttagcgttgccattgaaagttaaaatgtttgcatggtttaccctctgagttatgtttcttctagtaagcctctacctgcacgacaacacattatttactactttttgtaggtctatattttaataattattgggataataataattgtggtatgctttccatttacaaaccactcatatactttagtggatgtcatcctcaataatcgaatgagggaagaagtataagtgctcagctctttgcagataagaaactgggaacccagaaagtttattgagattgcttcgattggttaccgagccccgcaagggaagggaattcagaacctgagactcgaatcttctgagaggtgctgagctccatcccttaccagttaataggctcgaaatggcacacgtaaccaaattctgaactggagacccgacctgggatacgcattggcttacccccgggacaccccctgtcccgctcctgagcacaaaggtgggcccccagttccaatatggcaaagtgggactacgcttgctcagcgctgccccaacaaacttgacttccgcgagggccaaaaagtcgaaatatggtggagcgacccgcatggccgtgtgcccctgtaaaatttcaaacggccaatgagggcaaaagtgctacggaggcgccgggggcacacattaacctctcaggcagggtgaggcggcgacgcggcctgaacgcagcagttcgagaaacacgattggactccctgtattctgaaccattgagactgcgtgcccgtgccgggcgcggcgggcgaagcgtggtacgacctactgccccccccgaaggaaacgggagacgtgagcaacttgacgatctcacaccccgtcgtatgagaa

SEQ ID NO: 7907 - DNA, 5840 bp, Homo sapiens
  misc_feature (1052)..(1076): n is a, c, g, or t
  misc_feature (1928)..(1952): n is a, c, g, or t
  misc_feature (5784)..(5785): n is a, c, g, or t
tggagtgaggctgtgcgaagcgccgcatttcaatgaggacgggccgaggcacatccctgcactagtggccgcaaccgagacgccgcgctccagcagctgctgccgcccagcccggccccgccgccgccccccagccctgcagccccgcagccccggccgcgcccagcccggcgaggacagcaccaggaggcggcccccagcgcggccacaaagacccccggcggcgtctctccgcggaccggtcctacttgaagtccatcatgtccttcggcagagacatggagctggagcacttcgacgagcgggataaggcgcagagatacagccgagggtcgcgggtgaacggcctgccgagcccgacgcacagcgcccactgcagcttctaccgcacccgcacgctgcagacgctcagctccgagaagaaggccaagaaagttcgtttctatcgaaacggagatcgatacttcaaagggattgtgtatgccatctccccagaccggttccgatcttttgaggccctgctggctgatttgacccgaactctgtcggataacgtgaatttgccccagggagtgagaacaatctacaccattgatgggctcaagaagatttccagcctggaccaactggtggaaggagagagttatgtatgtggctccatagagcccttcaagaaactggagtacaccaagaatgtgaaccccaactggtcggtgaacgtcaagaccacctcgggttctcgggcagtggtcttcactggcccactccaaaggaagcccttcagaggtgcgagagaataaggatttcattcggcccaagctggtcaccatcatcagaagtggcgtgaagccacggaaagctgtcaggattctgctgaacaagaaaacggctcattcctttgagcaggtcctcaccgatatcaccgatgccatcaagctggactcgggagtggtgaaacgcctgtacacgttggatgggaaacaggtgatgtgccttcaggacttttttggtgatgatgacatttttattgcatgtggaccggagaagttccnnnnnnnnnnnnnnnnnnnnnnnnntgaaagtgaatgtcgagtggtaaagtccacttcttacaccaaaatagcttcatcatcccgcaggagcaccaccaagagcccaggaccgtccaggcgtagcaagtcccctgcctccaccagctcagttaatggaacccctggtagtcagctctctactccgcgctcaggcaagtcgccaagcccatcacccaccagcccaggaagcctgcggaagcagaggagctctcagcatggcggctcctctacgtcacttgcgtccaccaaagtctgcagctcgatggatgagaacgatggccctggagaagaagtgtcggaggaaggcttccagattccagctacaataacagaacgatataaagtcggaagaacaataggagatggaaattttgctgttgtcaaggaatgtgtagaaagatcgactgctagagagtacgctctgaaaattatcaagaaaagcaaatgtcgaggcaaagagcacatgatccagaatgaagtgtctattttaagaagagtgaagcatcccaatatcgttcttctgattgaggagatggatgtgccaactgaactgtatcttgtcatggaattagtaaaggggggagacctttttgatgccattacttccactaacaaatacaccgagagagacgccagtgggatgctgtacaacctagccagcgccatcaaatacctgcatagcctgaacatcgtccaccgtgatatcaagccagagaacctgctggtgtatgagcaccaagatggcagcaaatcactgaagctgggtgactttggactggccaccattgtagacggccccctgtacacagtctgtggcaccccaacatacgtggctcnnnnnnnnnnnnnnnnnnnnnnnnncggcctcaaggtggacatctgggcagcaggtgtaatcacttatatcctgctgtgtggtttccctccattccgtggaagtggtgatgaccaggaggtgctttttgatcagattttgatggggcaggtggactttccttctccatactgggataatgtttccgattctgcaaaggagctcattaccatgatgctgttggtcgatgtagatcagcgattttctgctgttcaagtacttgagcatccctgggttaatgatgatggcctcccagaaaatgaacatcagctgtcagtagctggaaagataaagaagcatttcaacacaggccccaagccgaatagcacagcagctggagtttctgtcatagcactggaccacgggtttaccatcaagagatcagggtctttggactactaccagcaaccaggaatgtattggataagaccaccgctcttgataaggagaggcaggttttccgacgaagacgcaaccaggatgtgaggagccggtacaaggcgcagccagctcctcccgaactcaactcggaatcggaagactactccccaagctcctccgagactgttcgctcccctaactcgcccttttaataagacccttttactcaaagtcctagcttaaccctttgagactctgagatttttttcccccaaatttgtgtaaaacagtttcatctgatctatctagcgctcaatgcttgaatggcagaactgaaagtgttttcaggtatctttgtagcggtttccctttactgaataagatgacacgtggtgattgtgaagatggtaatttgctgctaatagagtcctcaaagggttaaggccaatttgcaatttttttttaaacttagaagcaatgaatgttttcatcagtcaagctaggatctgcagtatgtaatatagcacttgttaaccctctgagtgcatagaattttattgagaattcttgtttgggaatttttcaggcctttggatgtatacacacatgtttcttgattttactgcagatcaaggggtgttgttagatgctgaaatgtccagaaaagaaggacatttagaatgatatcttgtttgtccttttctgtgggtttagaacgtggcaggtttataacttagacacacgcacggttctttcttcttcacaatcctattcagaaacagattttttttttcattagagatatgactgtcagttgcagtgagttctgcatcccaagtggagggaattgggtttgtggcaaagagcttgacccaggaaatagatggtgccccccaaattgtctccacatgaagatgtactgatgacgccccagaaatgctgcttccatatcagctgctgctagcgccagcgcagactctcagggagtcaccacagcttgtcttgtgcttggtgagtgagggtctctctactcagtgtcagacatctacaggaaagaaacaactggtggaaaagagcaataaattgcccggtgctctgcagggctggaatttcaaacagaaagagggaataagatcctgtgatttttctcacctgcttttccacgcactgtggtcatcactgtgcaatctacatctagtatgaaatccacacataggagagctggggcacaaggggactggaggcagttgctttgcaagatggctgaggagaaagcacactgggaacacaatccagaatgttctaacaataagttttcagtgaataaaccactggcaagacatttccatgtgcacctttaggttacctatatagtctcctaggaagatcaggatgaaagacctagatgatacccctgaggataaaacctccatcccctaaaatgattttttttaaataccactgtctttagctgtccaggaggtcagagtgttttttctgtctttgggccaagtcctgtctgagacctgtattttcactcttgttaccaaatctatctccctagtgcagtgtctccaggcctgagtttcttctggaacagattccattttagaatggggattcacaggttctgtgcatcaccacagtgctcagagaggattctcctggggtgtcttagaggcaggtgcccaactcaaatgtattcccaaggtttgctgggctctgggatccacgagacaaccagagagggatatctcatgaaatttgcatctggtggctgaacagtacctatgttctctgttttgaatatactttaatacctgagagtcttaaaatttgtgaacaacgtttctatagtcctttattttcaaatgcacattgatcttcacttgctgcatttttactcttcaaccctgaaactatggtctacattaatatggatttttaaatcacatgtcattacttttgcaacaccatcaccaaaattttttgctcttttacatttaggttcatctctgtggtctgtgttgtcctgacatgtaaaaagcatatcgtttattgaggtttttttcccccccttttagagcatccggaagtgataacacgcaaaatcacaaagtagcataaatcagtaaattagttgagttgtttttgggggggaggtgggggtagggggcacagaacaccagaaagagtgttggtgtgtaggtagattccatattaatgaggaacactgaactagttggaaattactgctttctctagaaatataaagcaaagcactattccaaggctatggagtagctctacagcctggcctcaactctaaaagtgtgaagaatgcaatgggcagagacctacctgcagtggactgtcattttcctttctttctctgaattactgctttttctgtgggcattaactatattgctacagcatctagtgtactgagcctgcggtgcatggctcaggccttttcccatcgacgtctagggggactctggaccgtgtgaagctagggggtgtttctcagcacactgcagaagggcagctcagaagaatgcagggcccattcagcatggggatcccagcacatcactgtagaatttgagtgatctatgctgaataaacagtggaatgtgaccagtcaagtagaaatcttgagtaatcagatggaatgcaatctttctaacattaagctaccaagatcctgaatgtcagagatgtactcagagggttaacagacaagcacaaggcatgctgactacattggtgtatccagattgctttgcttttagccagtgctttctaatttttttctcgacattcttgggatagttcaagtttgaaataattaagtggtggtgttctttaaggaatttctataaccaaattgatcttatttttgatttcacttatcatagaacaaatatgtatcattatggcagtgtatctatgtaattatcaatttaatcatcaccaccggtgtttccatattttttcccaagtatttaatatagctctcttatggtggtggcctggtgatggggaccgtctttcttttactgacacatgaccaatcatatggtattttcaagggaattttaagattcatcttttcagtttgatagtagactagttaaggaagaactctttcattacttgcatcgtgtaaatcatctctgtagacatgtgttcatattaatgaacacattttttctcaacattgtagcagaaatcattttattcgtcatgatcaatgaatatgtgatttgctccagatcgttagaaggaaaagtaagatttcagtcatcaaaaatgtttttaccgtagccctcatctaacttacacgtggtgcatattaaaataagcagagaaaaaaaaatgtgaataaactactgaaaacaaaaaaaatgttttgtgttcaatgagaccttnnctgcaacctgcttcccatgggtgggcagttaacaagcccatcaaatattggtgaa

SEQ ID NO: 7908 - DNA, 5042 bp, Homo sapiens
  misc_feature (1652)..(1710): n is a, c, g, or t
  misc_feature (2504)..(2528): n is a, c, g, or t
  misc_feature (3491)..(3510): n is a, c, g, or t
  misc_feature (4798)..(4824): n is a, c, g, or t
attacgcgctcttaaggtttctccgtggtgttttggaaggtcccggcacggctaccgtcgccccacgctaggaaatttttttttattttcaaattcgggaacgtgcctgcgcgtgcttggatagttcatttaaagcccccatccctgcaaggtggtgctttctaccaatatgaatcttttcaacctggaccgttttcgctttgagaaaaggaataagattgaggaagcgcccgaagcaacccctcaaccttcccagcctggcccttcttcaccaatttctcttagtgctgaagaggagaatgctgaaggggaagttagcagggcaaacactcctgattcagatataactgaaaaaacagaagattctagtgttccagaaactccagataatgaaagaaaagcaagtatatcatatttcaaaaatcaaagaggaatacagtatattgatttgtcttctgatagtgaagatgtcgtttccccaaattgctccaatacagttcaagagaaaacattcaacaaagatacagtgattatagtttctgagccatctgaagatgaagagtcccaaggccttcctaccatggcacgtagaaatgatgatatttcagaactggaagacctttcggaattggaagaccttaaagatgctaaacttcagactttgaaggaactttttccacaaagaagtgacaatgatttacttaagttgattgaatcaacaagcactatggatggagcaattgctgctgccttgctgatgtttggtgatgcaggtggtgggcccaggaaaagaaaattatcttcttcttcagagccatatgaggaagatgaatttaatgatgatcaatctataaaaaagacaagactggatcatggagaggaatcaaatgagtctgcagaatctagcagtaattgggaaaagcaggaaagtattgtactgaaattgcaaaaggaatttcccaattttgataaacaggaacttagagaagtactcaaggaacatgaatggatgtacacagaagctttagaatctctaaaagtgtttgcagaagaccaagatatgcaatatgcatcacaaagtgaggttccaaatggaaaagaagtttcttcaagaagtcaaaattaccctaaaaatgcaactaaaacaaaactaaaacagaaattttcaatgaaagcacaaaatggctttaacaagaaacgtaaaaaaaatgtttttaatccaaagagagttgttgaagactctgaatatgattcaggttctgatgtcggtagttcactagatgaggactatagtagtggtgaagaagtgatggaggatggctataaaggtaaaattcttcacttccttcaagatgcttcaattggtgaacttactttgattcctcagtgttctcagaaaaaggctcagaagataacagaactccggccctttaatagttgggaggctctgttcacaaagatgtccaaaactaatggcttatcagaagatttgatatggcactgtaaaacactgatccaagaaagagatgtagttataaggcttatgaacaaatgtgaagacatttcaaataaattgaccaaacaagttaccatgcttactggaaatggaggtggatggaacatagaacaaccttccattctaaaccaaagcnnnnnnnnnnnnnnnnnnnnnnnnnnnnnnnnnnnnnnnnnnnnnnnnnnnnnnnnnnncatggacttaatggcattttggcagatgaaatgggcctaggaaaaactattcaagccattgcatttctggcatacctctatcaggagggtaataatggtcctcatttgatcgttgttccagcttcaactatagataactggttaagggaagttaatttatggtgccctactttgaaggtcctctgttactatggttctcaagaagaacgtaaacaaattagatttaacattcatagtagatatgaagattacaatgtaattgtgaccacatataactgtgcgatcagcagttctgatgatcgtagtctgtttcgacggctgaaacttaattacgcaatttttgatgagggccatatgctgaagaatatgggctccattcgctaccagcaccttatgacaattaatgcaaataaccgtttgctgctcacaggcacacctgtacagaacaatctgttagaactcatgtcgctgttgaattttgttatgccacacatgtttagtagtagcaccagtgaaatacgaagaatgttttcctctaagacaaaatcagcagatgagcaaagcatatatgaaaaggagagaatagcacatgcaaaacaaattataaagccatttattctcagaagagtaaaagaagaggttctcaagcagttaccccccaagaaagatcgaattgagttgtgtgcaatgtcggagaagcaggagcaactctatttgggtcttttcaacagattgaaaaaatctatcaataacttggaaaaaaacacagaaatgtgcaatgtcatgatgcagtnnnnnnnnnnnnnnnnnnnnnnnnntttattacatcgccaatattacacagctgaaaaactcaaggaaatgtctcagcttatgctaaaggaacctacacattgtgaggctaaccctgacctgatctttgaagatatggaagttatgacagacttcgaactacatgtactttgtaaacagtaccgacacattaataactttcagttagacatggacttgattttagattctggaaaatttcgagttttaggatgcatcttgtctgaattgaaacagaagggtgatagagttgtgttatttagccaatttaccatgatgctggatatcttagaggttctattaaaacatcatcagcataggtacctcagattagatggaaagactcagatttctgaaaggattcatctaattgatgagtttaataccgatatggatatctttgtgtttctgctatcaacaaaagctggtggattaggaataaatctgacttcagcaaatgttgttatacttcacgatattgactgtaatccttataatgacaaacaagcagaagatagatgccatagagtaggccagactaaagaagtactagttataaaactaataagccaagggacgattgaagaatccatgctaaaaattaaccaacagaaattgaaactagaacaggatatgactacagtagatgaaggtgatgaagggagtatgccagcagatatagccacattactaaaaacatcaatgggcctgtgaaataagaactgtgaactctcaattgatgaggaaatatcaacttggtgcactcaaggacatttacattatgatgaccatggggtttatgaacatttataactttttataatttccatattacatttctcatagtatggacaactttttgccactaactgaattctccaaatactcacacgtgaaatttcaaaaaagaagccacaaatatgtagttctgaagatgttgaataatcatnnnnnnnnnnnnnnnnnnnnatggggattagttggtgattgtttgtaacaaatatgctaatgctttagaaatgtcagtatttttgtaattatttctacctccaaatatatatatattgtctttcactggataatgtgtgtagatttttacatgtgccttatttgacaatgcttatgtcttgtttttgcttgtctcatttgaagttcttttttattatgttaaagaatgcagctgtatagattatatagctttcattttattgctatttgaagcagatgttcaccaatgtcagcaagaactcaacctgaatttaaaggtggcattccatatactaacatcccccaggtcctctcaagtacttctgctgaaacaaatttatttggctaggcactaagttgttttccagtgaatagtaactaaagaagcccctaccttgctccatggattaattccttctgttcattttccaactgcactaattgtgcatattactctgcctaatcttgtgcatgttttcattgatttccctctcccggcttttgcttctcttgaaactgttgcccagtcacttctgctccaattctcttcctctctaaatagtagtttattactgccacatctccatgcatcagcaaaatgttggtgacatttttctagcctggcagaacagattacttaaagctatttcacttcaaagcagactgaatgtgacttcatctaaaggcagcattaggtactgcatggaaataggtcattaacttgaaactcttatcaaaatatattttaccagtttccagaatttccagtacaggaccgcctgaagagagagccattgttcaattccaattcagtgtgagtgacaaagtgaaatttagaagtgaagttgtctatttgatatttaactctttattaaatctttctttaaatttctgcctgtcagtctatattgctgtttttattatacatcagtttctttgtataacttgtgagttccatgtgttttgtttttattatgtaaatatcattataaataaacttatttataaatcaaagatttgttaatttttggaaatcatgcttttcaaagcatcctaacttgctaagatgctaggtagtacgaccctctggatttggaaggcaaataaaactcttacagtgattatttagatattaaagactgagaactcacggcttaaccccagtcttgatggtatattgaacagactgaatatattttaccattacagggctaaaaggagtcttcgtgtgttaatactacctccttgtacatcactatacccaaatcannnnnnnnnnnnnnnnnnnnnnnnnnnccttttaaaatctcataatggatatctcatgttttctgtattaatgtattttcaatgataggctgtttctttttttgttgttattgttgttgttgttatatccatacttttatctctaatgaaatgtagttgggttcttcctgtaatgcgctattatgtcttgggcttaataaaaatatttgtgatcataaaaaaaaaaaaaaaaaaaaaaaacattt

SEQ ID NO: 7909 - DNA, 1052 bp, Homo sapiens
cgtttccgccggaagagcacctcaagctccccggttcgagcggggctcactgcccccaggaggacgcaagagaaggggggggctttggcaaacgcccgattggtgtttgatatccaaaggtggacaccttgggcttgaattggggtcaccaccgagtttttttccaggtctcccaaggaagttaggctattcacaaccactcattcaagagttgaacttaccccatagatgtagataacctcagaaatttaattcatgtttcttaaatgggctacttggtccttttggttattagggtggtatttagtctattaccctcaaaattgggaaaggagtagaagaagcagtaactgacaacttgaataatccacccagaggataatatgagaatcgagatcatttcaaaactcatttcctatgtaactgcattgagaactgcatatgtttcgctgatatatgtgtttttcacatttgcgaatggttccattctctctcctgtactttttccagacacttttttgagtggatgatgtttcgtgaagtatactgtatttttacctttttccttccttatcactgacacaaaaagtagattaagagatgggtttgacaaggttcttcccttttacatactgctgtctatgtggctgtatcttgtttttccactactgctaccacaactatattatcatgcaaatgctgtattcttctttggtggagataaagatttcttgagttttgttttaaaattaaagctaaagtatctgtattgcattaaatataatatgcacacagtgctttccgtggcactgcatacaatctgaggcctcctctctcagtttttatatagatggcgagaacctaagtttcagttgattttacaattgaaatgactaaaaaacaaagaagacaacattaaaacaatattgtttctaaatgctgaggtttagctgtcagttctttttgccctttgggaattcggcatggtttcattttactgcactagccaagagactttacttttaagaagtattaaaattctaaaattctaa

SEQ ID NO: 7910 - DNA, 4949 bp, Homo sapiens
cagaaatgcaacaagtagtacccggggtctgcagagcgccccgcgccgcctgacttggccgggcgaagcccgcctgcagagacccgggccggcctccggacaaaggacggaggaggggctggacggcgctgcgaagtccgaaagaggccatttagcgactctggccaggctaaggggaatgcagaggagacacagagccggcgggccaagaggacgatccggccgctgcacgcagggcgggaggcgatggaggctgcccgcgccttgcgcctcctgctcgtggtgtgcggctgcctcgcgctcccgccgctggccgagcccgtgtgcccggagcgctgcgactgccagcatccccagcatctcctgtgcaccaacagggggctccgcgtagtgcccaagaccagctcgctgccgagcccccacgacgtgctcacctacagcctcggcggcaacttcataaccaacatcacggccttcgacttccaccgtctggggcagctcagacggctggacctgcagtacaaccagatccgctctctgcaccccaagaccttcgagaagctctcgcggctggaagagctgtacctggggaacaacctcttgcaggcgctcgccccgggcacgctggccccgctgcgcaagctgcgcatcctctacgccaacgggaacgagatcagccgcctaagccgcggctccttcgagggcctggagagtctagtcaagctgcggctggacgggaacgccctgggggcgctgccggacgcggtcttcgctcccttgggcaacctgctctacctacatctggagtccaaccggatccgctttctgggcaagaacgccttcgcccagctaggcaagctgcgcttcctcaacctctctgccaacgagctacagccctccctgcgccacgcggccaccttcgcaccgctgcgctccctctcctccctcatcctctcggccaacagcctgcagcacctcgggccgcgcatcttccagcacctgccacgtctcggcctgctctcgctcaggggcaaccagctcacgcacctcgcgcctgaggccttttggggcttggaggccctgcgcgagctgcgcctggagggtaatcggctgagccagctgccaactgcgctgctggagcctctgcacagcctggaggcgctggacctgagcggcaatgagctgtccgccctgcacccggccaccttcggccacctgggccggctgcgcgagctcagcctgcgcaacaacgcgctcagcgccctatccggggacatcttcgccgccagcccagccctttatcggctggatctagacggcaacggctggacctgcgactgccggctgcgaggcctgaagcgctggatgggcgactggcactcgcagggccggctcctcactgtcttcgtgcagtgtcgccaccccccggccctgcgaggcaaatacctggattacctggatgaccagcagctgcaaaatggatcctgcgcggatccctcgccctcagcttccctgaccgctgaccgcaggcggcagcccctacccacggccgcaggggaggagatgacgccacctgcaggtctcgcggaggagctgccgccgcagccgcagctccagcagcaggggcgatttctagctggggtggcctgggatggggccgccagggagctggtaggcaaccgcagcgctctaaggctgagtcggcggggcccgggcctccagcagcccagcccctccgtcgctgccgccgcgggcccggctccacagtccctagacctgcacaagaagccccagcggggccgtccgactcgggcagatcccgccctcgcggagcccaccccaacggcctctcctggctctgcgccatcgcccgccggcgacccctggcagcgcgcgacgaagcatcgtctgggcacggagcaccaggagcgtgccgcccagtccgacggtggggccgggctgccgccgctggtgtccgacccatgcgacttcaacaagttcattctgtgcaacctgacggtggaggcggtgggcgcagacagcgcctcggtgcgctgggccgtgcgcgagcaccgcagtccccggccgctgggcggcgcgcgcttccgcctgctctttgaccgctttggccagcagcccaagttccaccgcttcgtctacctgcctgagagcagcgactcggccacgctgcgcgagctgcgcggggacaccccctacctggtgtgcgtggagggcgtgcttgggggccgtgtctgccctgtggctccccgggaccactgcgcggggctggtcaccctaccggaggccgggagccggggcggcgtcgactaccagctgctgaccttggccctgctgacggtcaacgcgctgctggtgctcctggccttggcggcctgggcgtctcgctggctgcgtaggaaactgcgggctaggcggaagggcggggccccggtccacgttcggcacatgtactccacccgacggcccctgcgctccatgggcaccggcgtgtccgccgacttctcgggattccagtcgcaccggccacgcaccaccgtgtgcgcgctcagtgaggcggacctcatcgaattcccctgcgaccgcttcatggacagtgcgggcggcggcgcgggcggcagcctgagacgggaggaccgtctcctgcagcgatttgccgactaggtccagggcatatagagaccatctcattggccctaaggagccgcctctccgtgaggcccaccagcccacctcaggggaagtgccgttttgtgcacttgccagagaggccggtggggacagagggccaattcgggcaccatcccccaattcccaatactcgagaagtaaatggatggtacttggtggtcagagccagagtaggggacaaatggatggtgggatgctgaggtcggaggcttcgcttggaggctttgacacagctatgcgaatggcttttgtagcactgcaatgcagaagccaggctttgggggtagaaagggggtgcttgtgcccccaacatggccagaaatatttgggtgcatgctttttgtttgctcagtgtcaaacagagaagttttgtttctatttaaggaaggaacttattaccattacaaaggaggcttggccagggactccactggtttggtgatctctgccaagaagggggatgtaaacaggtggtaaagtttaacatacccgccaaggaactcgtttatgttggctgatagagcattcaggataccttaaagtttaataagagacgcatttttttttttcaaaaatgtgaaaagctctgacatttaacgaactgaccaatagactcaaggactgttttagttggactgggccattttattatgttccttttaatattaacagtacaagagcgcttgctgacttcgaggataactaagattacatactttctcaggagaaggctgcatgcaagacttctctgtcagggttgctcctgtggcttttttaattttatttttttaaacctatatatggaaaaggaaatttcaatgccagatttgataaaagaatgtgatgtatatgtagctgatgacccactggggaacaccagtgttccagttcacttaccacatctgtgacagtgtgtttagattggaataaatgtgatgcattacttcttatgtttttatcagtgacatggttgactgtgccctaattctcttgagttgcagttaagcaatgaaggttatttcctaatagggaagcaaaaggtgattgtcaattgatagtttaatgtttgaccacattagtgtctttatatgaaatagtagaggggaagaaattatagaaaacaaatgtgaaaaaaatacaccagtgggtatctgttctactaaaaccagaagattgttatgagtacttaaacctcactgtgaaataatgatatattttgcaattaatccctccccaactgagtgtcttactgtgttattaaatcttatcttttagttaatagttgcagtatttcttttaaatgtttttgttttaaacttaggggtaggatcctttatttgttcagttgtttccaactatttgggatactttcattccctgctatttatgaagtacatgtttatcactaagtgtagtggtttggtttacattaataattttatgtgtggtctaaaaatgcagtcactaagagaatgtacactgtggttatggtcacagtggttatggatttattggcagtggagtaccatggaggtcactgcaatggtgctaaggctgacagtggaatcttctgtttagggccttaagcccctgagggtcctggtgactcagggaatccatcacagccccgggtctttcaccccagttcactccttttatgtttggcctagattgacccatgcctgccctcttctcaacagctgagtagggaaccagccatctgaatgagctgatcgttgtttatgttcaaatgagtaaatgtccagaccacttaaaactacagctgcttttctggcagtctcgtctgcggggccaaaacttaataaaccacaggaaatagactgtcattcttagtttgctgccagggcttattttagattgagagcatactggtacatgagagcagtagtgttgtttgctcttattttcaaccagggagctatctggcaccttttgtgctcctggcttttttcaatcatagcactattgcatctcctagctatttcttttgcccagcagggtaatattgagtcccattgcaagtatggacaaggcctctggttctcctcaccacccaccttttcagccatagaacatcactgaaaatgcctaatgcctggatctgtgttctactttagtttcactgggaagtctttcagtgggagatgaataaatgttatacattgttatgtccagttatgtcaataaacccactaatagagataaaaaaaaaaaaaaaa

SEQ ID NO: 7911 - DNA, 3237 bp, Homo sapiens
  misc_feature (3176)..(3208): n is a, c, g, or t
ggccgcgcctgtccggggatcgtcgagggacggcgggagcttgggccagcggcggcggcggcctgggacgcaggcggagccccgcgcaggcccaaggtcccggaggctatggcagcggctaccatcgtgcacgacacgtctgaggccgtggagctctgccctgcttacggcttgtacctgaagcccatcaccaagatgaccatcagcgtggcactcccgcagctgaagcagccggggaagtccatctccaactgggaggtgatggagaggctgaagggcatggtgcagaaccaccagttctccacgctgcgtatttccaagagcaccatggacttcatccgcttcgagggggaggtggagaacaagagcctggtcaagtcttttctggcctgcctggacggcaagaccatcaagctcagcggcttctccgacatcctgaaggtgcgcgcggccgagttcaagatcgacttccccacccgccacgactgggactccttcttccgcgacgccaaggacatgaacgagaccctgccgggggagcccggacaccatccacctggaggggctgccctgcaagtggttcgccctgaaggagtcgggctccgagaagcccagcgaggacgtcctggtcaaggtgtttgagaagttcggggagatccggaatgtggacatccccatgctggacccctaccgggaggagatgacgggccgcaacttccacaccttcagtttcggggggcacttgaacttcgaggcctatgtgcagtaccgtgagtacatgggcttcatccaggccatgagcgccctgcgcgggatgaaactcatgtacaagggcgaggacggcaaggccgtggcctgcaacatcaaggtttcttttgattcgaccaaacacctgagtgatgcctcaattaagaagcggcagctggagaggcagaagcttcaggaactggagcagcaaagagaagaacaaaagcgcagagagaaggaagcggaggagaggcagcgagcggaggaaaggaaacaaaaggagctggaagagctggagcgagagaggaaaagagaagagaagcttcgcaagagggagcagaagcagagggaccgtgagctgcgccggaatcagaagaagctggagaagctgcaggcggaggagcagaagcagctgcaggagaagatcaagctggaggagcgcaagctgctgctggcccagaggaacctgcagtccatccggctcatcgccgagctgctcagcagagccaaggctgtgaagctacgggaacaggagcagaaggaggagaagctgaggctccagcagcaggaggagcggcggcggctgcaggaggccgagctgcggcgcgtggaggaggagaaggagcgcgcgctgggcctgcagcggaaagagcgggagctgcgcgagcggctgctgagcatcctgctgagcaagaagccggacgacagccacacacacgacgagctgggcgtggcacacgccgacctgctgcagcccgtcctggacatcctgcagaccgtgtcgtccggctgtgtgagcgccaccacgctgcaccccctcgggggccagcccccggccggtgcccccaaggagagcgcggcccacccagaggccgacggcgctcccaaaagcgtgaacgggagcgtggccgaggaggccccatgcaaggaggttcagagctcctgtcgtgtggtccccgaggatggctctccagagaagaggtgcccgggcggcgtcctctcctgcattcctgacaacaaccaacagcccaagggcatccctgcctgcgagcagaatgtctccagaaaggacacccggtcagaacaggacaagtgcaaccgggagcccagcaagggccggggccgggccaccggagacgggcttgctgaccggcacaagcgggagaggagccgggccaggcgggccagcagcagggaggacgggaggccacgcaaggagcggcggccccacaagaagcacgcctacaaggatgacagcccccgccggcgcagcacgagcccggaccacacccggtcccggaggtcccacagcaaagacaggcaccggagggagcggagccgggagcggaggggcagcgccagcaggaagcacagccgccaccgccgccgaagcgagcggtcgcgctcccggtccccgagcaggcaccgcagtacctggaacaggtaatgacgggcacggcctccccacggcctgtccgggaaagaccaggacctgctcgagcctcctggccgctccttggccgctctccgtccacccctgcaaagccaagacccttctgcagccacgaatgtccacggagcctgccggcaggaaggaagacaccatgctttagagatccatctttctccactcaccgcagcgtacttggcacttcagtttcaaacacgtagtcctttaaaacttgatccgatagctttaatgcggccggtcctctctcagtcaggaaaattgcacagaccgacagtcgtgaggatggcagagctgctgcattcccccacatggggatttctgtgtctgcttggcgacctccctgcgtgcacggcctaggaggtgcacgggccaccatagtcacactggcactgaaaagaaagcgttgccctggtgattctttcccccccgtttgtaatgttaactgatcaggaagtgcagtttgggtgggatgccgaatcgtcgtgctgacattgagtcacggatgaggaaggtacaagtcctttaagatcaaaactcaaacgggccgttctttctaaggtgtcggtatgtggggagtggtacaaaatggtctgatgctccttcaaaaacattcactttttacaacgtcaaggaattaagcataaaaaagattggttaaaagctttggtttctagtaaaggttagtgtgtgtggtttttttaagaagctgttttgctaaattatttttacttggaatgtttcaaacagatttcaggctgcaaacttgttttataatcgtttgcttctccaagtgaagctcagaaatacctaaaaatagctgtaacgttcgcgttaggaaagatggtgtttattccagtttgcatttttatggtgaaataaaatccttttccaatgaaaaaaaaaaaaaaaaaaaacaacaaaaaaaaaaaaaaaaaaaacaaaagtaggagcacaaaannnnnnnnnnnnnnnnnnnnnnnnnnnnnnnnngggggggcgggccctcctcaaaaataccc

SEQ ID NO: 7912 - DNA, 2062 bp, Homo sapiens
agagagaattatgacccaagcaagaatcatgggtccagaattccacccaaggaagctagttcaaagccagagaaagagcacagcttttcacacaattgaatagatctcaacttcatgattttggtattgaagatgctgacagtagccagtggctctgtgaaggcaattttccaacctaccattcttggctactcctgggatattttacttggctgtgagatccccctgagaagcttctctttttctcacacaattcctccatcagcgaagtgtggtgggcagcacacagtgactatgattcctggagatggcactgggactgaacttatgctgcctgtcaagattatgttcagacatctgtgtgtgcctgtggactttgagggaatgtcagtgacctccacctctgcctcacatgaagaggaaattcataatgccatcatggcagttcattgaaaccgtgtggctttgaagagtagcgttaaaactgacgacaccctgccaccatcatacaaatccttcaacaacatgttgcataccaccctagatctctatgccagtgtcattcatttaaaaaatttgccaaacgtggagacctggcacaaagatgtagacatcctagttgtttgggaaaacacagagggtgagtatagcaatctggagcatgagagtgtgaaaggagtgacagagagcctaaagatcatgactaaggccaagtctttgcgcattgctgaatatgccttccagctggcccagaagatgggatgcaaaaaagtgatggctgtgcacaaggtcaacatcacgaaactgggagatggtcccttcctccagtgctgtgggggaggtggcatcccgctatcctcagctcaccttagaagacatgattgtggagaatgccacaatgcactttctgtgaagagggctgcagatacggtggaacgtgtgtggctcccaacaaatgtgtctgtccatctggattcacaggaagccactgcgagaaagatattgatgaatgttcagagggaatcattgagtgccacaaccattcccgctgcgttaacctgccagggtggtaccactgtgagtgcagaagcggtttccatgacgatgggacctattcactgtccggggagtcctgtattggatggcaagatattctgccgacggacagcttgtgattgccagaatccaagtgctgacctattctgttgcccagaatgtgacaccagagtcacaagtcaatgtttagaccaaaatggtcacaagctgtatcgaagtggagacaattggacccatagctgtcagcagtgtcggtgtctggaaggagaggtagattgctggccactcacttgccccaacttgagctgtgagtatacagctatcttagaaggggaatgttgtccccgctgtgtcagtgacccctgcctagctgataacatcacctatgacatcagaaaaacttgcctggacagctatggtgtttcacggcttagtggctcagtgtggacgatggctggatctccctgcacaacctgtaaatgcaagaatggaagagtctgttgttctgtggattttgagtgtcttcaaaataattgaagtatttacagtggactcaacgcagaagaatggacgaaatgaccatccaacgtgattaaggataggaatcggtagtttggtttttttgtttgttttgtttttttaaccacagataattgccaaagtttccacctgaggacggtgtttggaggttgccttttggacctaccactttgctcattcttgctaacctagtctaggtgacctacagtgccgtgcatttaagtcaatggttgttaaaagaagtttcccgtgttgtaaatcatgtttcccttatcagatcatttgcaaatacatttaaatgatctcatggtaaatgttgatgtattttttggtttattttgtgtactaacataatagagagagactcagctccttttatttattttgttgatttatggatcaaattctaaaataaagttgcctgttgtgaaaaaaaaaaaaaataatgcaaaaaaaaaaaaaaaaa

SEQ ID NO: 7913 - DNA, 1676 bp, Homo sapiens
gttttgtttggcgcctgcgtctggcacgagggcgggctggcgtgcggcgccgttgcgggcgggagcggctgcaacgccggtgcctgaggagcgatgccgagggaaatcatcaccctacagttgggccagtgcggcaatcagattgggttcgagttctggaaacagctgtgcgccgagcatggtatcagccccgagggcatcgtggaggagttcgccaccgagggcactgaccgcaaggacgtctttttctaccaggcagacgatgagcactacatcccccgggccgtgctgctggacttggaaccccgggtgatccactccatcctcaactccccctatgccaagctctacaacccagagaacatctacctgtcggaacatggaggaggagctggcaacaactgggccagcggattctcccagggagaaaagatccatgaggacatttttgacatcatagaccgggaggcagatggtagtgacagtctagagggctttgtgctgtgtcactccattgctggggggacaggctctggactgggttcctacctcttagaacggctgaatgacaggtatcctaagaagctggtgcagacatactcagtgtttcccaaccaggacgagatgagcgatgtggtggtccagccttacaattcactcctcacactcaagaggctgacgcagaatgcagactgtgtggtggtgctggacaacacagccctgaaccggattgccacagaccgcctgcacatccagaacccatccttctcccagatcaaccagctggtgtctaccatcatgtcagccagcaccaccaccctgcgctaccctggctacatgaacaatgacctcatcggcctcatcgcctcgctcattcccaccccacggctccacttcctcatgaccggctacacccctctcactacggaccagtcagtggccagcgtgaggaagaccacggtcctggatgtcatgaggcggctgctgcagcccaagaacgtgatggtgtccacaggccgagaccgccagaccaaccactgctacatcgccatcctcaacatcatccagggagaggtggaccccacccaggtccacaagagcttgcagaggatccgggaacgcaagttggccaacttcatcccgtggggccccgccagcatccaggtggccctgtcgaggaagtctccctacctgccctcggcccaccgggtcagcgggctcatgatggccaaccacaccagcatctcctcgctcttcgagagaacctgtcgccagtatgacaagctgcgtaagcgggaggccttcctggagcagttccgcaaggaggacatgttcaaggacaactttgatgagatggacacatccagggagattgtgcagcagctcatcgatgagtaccatgcggccacacggccagactacatctcctggggcacccaggagcagtgagtcccccaggacagggaccctcatctgccttactggttggcccaagccctgcctgactgaccaccccctcagagcacagatcagggacctcacgcatctctttctcatatacatggactctctgttggcctgcaaacacatttacttctcctcttatgagactatttatctttaataaagcactggatataaaaaaaaaaaaaaaaaaaaaaaaaaaaaaaaaaaaa

SEQ ID NO: 7914 - DNA, 4869 bp, Homo sapiens
acggctgcgagaagacgacagaagggggagccgagcgcggtggtgaggccgcctgggtggcgttctcggacgaggaagagacccacaagttctatttaaagggaccgacagcccgccccgggaggaaggggcgccaggcccgaaagccgcctccccctcccagacccgagagctcgtgcggggcaaagtgaaccgagccgctgggcgtgcaaggggaagcccaagcccgttctcccggccaaagtgaactttaatcggggtggttggatgcggagacggggcggcaggacctgctagaagtggccgaagatgaatccccagcaacaacgcatggccgctatagggaccgacaaggagctgagcgacctactggacttcagtgcgatgttttccccacctgttaatagtgggaaaactagaccaactacactgggaagcagtcaattcagtggatcaggtattgatgaaagaggaggtacaacatcttggggaacaagtggtcaaccaagtccttcctatgattcatctagaggttttacagacagccctcattacagtgatcacttgaatgacagtcgattaggagcccatgaaggcttgtccccaacacctttcatgaactcaaatctgatgggaaaaacatcagagagaggctcattttccctgtacagcagagatactggattaccaggctgtcaatctagtctcctgagacaagatctggggcttgggagcccagcacagctatcttcttcaggaaaacctgggacagcatactattcattctctgctacaagttccaggaggagaccactccatgactctgcagcgcttgatcccttgcaagcaaaaaaagtcagaaaggtgcctcctggtttgccttcttctgtatatgcaccatccccaaattcagatgatttcaaccgtgaatctcctagttatccatctcctaagccaccaaccagtatgttcgctagcactttctttatgcaagatgggacccacaattcttctgacctttggagttcatcaaatgggatgagccagcctggttttggtggaattctggggacctccacttcccacatgtctcaatccagtagttatggcaaccttcattcacatgaccgcttgagttatcctccacactcagtttcaccaacagacataaacacgagtcttccaccaatgtccagctttcatcgcggcagtaccagcagttcaccttacgttgctgcctcacacactcctcccatcaatggatcagacagcattctaggaaccagagggaatgctgctggaagctcacagacaggtgatgcacttggaaaggctttggcatctatttattctcctgaccataccagcagtagttttccgtcaaatccatcaacaccagttggatcaccttcacctctcacaggtaccagtcagtggccaagacctggagggcaagcaccttcatccccaagctatgaaaactcactccactccctgcagtctcgaatggaggatcgtttagacagactggatgatgcaatccatgtgctgcggaaccatgctgtgggaccttccaccagtttgcctgctggtcacagtgatatacatagtttattgggaccatcccataatgcaccaattggaagcctcaattcaaactatggaggatcaagccttgttgcaagcagtcgatcagcttcaatggttggaactcatcgggaagactctgtcagtctcaatggcaatcattcagtcctgtctagtacagtcactacttcaagcacagacctgaaccataaaacacaagaaaattatagaggtggcttgcaaagtcagtctggaactgttgttacaacagaaatcaagactgaaaacaaagaaaaggatgaaaaccttcatgaacctccttcatcagatgacatgaagtcagatgatgaatcctcccaaaaagatatcaaggtttcatctagaggcagaacaagcagtactaatgaagatgaggatttgaaccctgaacagaagatagaaagggagaaggagaggcggatggctaacaatgccagagaacgcttacgcgtgcgggatattaatgaagcattcaaagagcttggccgaatgtgtcagcttcacttgaagagtgaaaaaccccaaacaaaactccttattcttcatcaagccgtggcagtcatccttagtctagaacagcaagtcagagagaggaaccttaaccccaaagcagcctgccttaagagaagggaagaagaaaaagtttctgccgtatcggcagagccgccaaccacactgccaggaacccatcctgggcttagtgaaactaccaaccctatgggtcatatgtaaacatcagccagttccagagttatcagtaggctagatagaaggtgacctctcctcataaggacttggacaactcagattatctgaagacacaaacctgacaggagggagaagaaaaaacaaaacacttgaaccaagaaactcaaatgtaatcctacgatcaaagcaactggtcaacacttccatcagaagtgaagataggaagctcatcagatagaacatcagcccatgagatgtttgcaacaaatcttttgttgcaagcagtgtgtcgcttctgcacaatcagagactgtctcgatctctccactcaccgtggaagttgccttgtgcctaaactgaattgacaaatgcattgtaactacaaattttatttattgttatgaaactgtaaggtctacatataaagggaaaaagttaatgtggaaagctgatctacactcagctgatgccagcatacattaaagcggttcacgtgcagagaacaaagcagtgacaaccattggcccttagcattcccggcatacctattagtgtcttaaaaaggaagggaaaagtcttttgttgccctctcctatcctcttgccatatgaatagcgttttccatgaaataggaaaatattacttggtatagcatttctcttgctctcattttttgatttatttttattttctctttgtgggtgttatatttgatctctaaatctgaacagtttatggtcacagtccagcctcctccgtgcagccctgtgtgctttgcacatttaccttacagtggtaagcagagaccatctgtgaccatagcctagctagcattttaaaaggggaaattttgttctctaggttttcccccaaataaacattgctttatttctaataataaccaagacttttcaagcttctagatctcataggaaagcttgtaatagcaaaattgtaaattacaagggaagaatctactttttagaaatcgctttgttttccaagcagtaagtactacatacagtacttgtaaagtgttagctgtaagtaagcacaaaatacatttaaaatacaaagacgattttttcaggctgtgattatggtgaacataacaaaacccagtagtcaccaaggcaggtagtgtgataaatgaacacaccactctgaggctaattacctaatggaatacaagagcaatggtcacccgtatttccttatcctagcctttatttctctgtcatttggatggctggtcaatggggaagaattgagtgggtgatttaatcaactgcaaaccatctgcccctgtcccaaaatgatgagccagattagcattaaaccagtacttgtcagtccatcttaatactgttcattaaggcactctctgtctctaatccttaggagttgttttaaaagacataatcactttgaacttccatgaaacctgtcttccaccacaacaaccctgggagagaaaaacatgctaaaggaggtatcttggcttaataattccttatagccaatatcaacagtggcaatcagcacacagaggaaaggacccaaatcactatgtagcttaaagatttctgttaatttgaaagaacaaaaacaagacagaacttctggtactctaatcaggatgattcctaacaagtcagtcatttgtgaacttagtggactttttggttactttaatttgcatatattctccagttacatcggactctatctgtggccttgttcttcatttcagtgttaatcagctaaacagaagttgttgcttatgatgtgtgagtgaacatatgccactgcctggcccttttttcttcagagcttgttgtctttttcgctatattagactttgcagtatgcccagaagctttccttcataaaatagaaagaaaaaaacatttggcttatttttcactgtagctagtcttttatacaataatcttgtaagaaaatttcttgaattctaaatattactctttctagatttttgaaatcaaaaagttttcagtaaaaagtttcttactttattttattatattaggtagtaaaaaatgtagggttatttaccataacctgttcattaatatcagaaatttacaatagcattttaagaccatagtaggattctagcataccgtgtagtacctatggagtattgtaagagctaattgttggagatgaattgcttctcatcttgttctccagtttccattgttggtttattgcagatttgtatcctgtgtcaaattcaaggtattattgataaaccttttcaaccagcagcaagaagttcaaatttttttctgtcactgtaacagaaaacacaatatgtatataacatttatgtagcaataaatgtgccatcttttttttaacacagcaaaaaaaaaaaaaaaaaaaaaaaaaaagggggggcgcaatatccggggagacatcagaccatttcaaggccctaatagcataataaacggggtaccaggaaagcatcgttgaggcactgtgggtgaacccacagaatagtta

SEQ ID NO: 7915 - DNA, 4552 bp, Homo sapiens
gctctttaccctcattggcgcttctctcctgcagtccgcctctgggccctgccgcatttcttgagacttaaagtggcattctaaaggcaatttaaaaatcatgtcaagctcagttgaacagaaaaaagggcctacaagacagcgcaaatgtggcttttgtaagtcaaatagagacaaggaatgtggacagttactaatatctgaaaaccagaaggtggcagcgcaccataagtgcatgctcttttcatctgctttggtatcatcacactctgataatgaaagtcttggtggattttctattgaagatgtccaaaaggaaattaaaagaggcacgaagctgatgtgttctttgtgccattgtcctggagcaacaattggttgtgatgtgaaaacatgtcacaggacataccactaccactgtgcattgcatgataaagctcaaatacgagagaaaccttcacaaggaatttacatggtctattgccgaaaacacaagaaaactgcacataactccgaagctgatttagaagaaagttttaatgaacatgaactggagccctcatcacctaaaagtaaaaagaaaagtcgcaaaggaaggccaagaaaaactaattttaaagggctgtcagaagataccaggtccacatcctcccatggaacagatgaaatggaaagtagttcctatagagataggtctccacacagaagcagccctagtgacaccaggcctaaatgtggattttgccatgtaggggaggaagaaaatgaagcacgaggaaaactgcatatatttaatgccaagaaggcagctgcccattataagtgcatgttgttttcttctggcacagtccagctcacaacaacatcaagagcagaatttggagactttgatattaaaactgtacttcaggagattaaacgaggaaaaagaatgaaatgtacactttgcagtcagcctggtgctactattggatgtgaaataaaagcctgtgttaagacttaccattaccactgtggagtacaagacaaagctaaatacattgaaaatatgtcaccgaggaatttacaaactatactgtaaaaatcatagtggaaatgatgagagagatgaagaagatgatggaacgagagagtaaaagccgaggaaaagtagaaattgatcagcaacaactaactcagcagcaacttaatggaaactaggttcatgggacagagttagaaaactggggatgaataagacatccataactactattcttttttcactgttttctaaaatcaaaaagggtttgtaactttttactgcccaactcttagatccttcattgaactgcctaaaaatgtcttgtttgttttatgagccctcactagaaggctgagtttgacatgttgatattacgtagctatagtttgcagtttctgggaagcaattgaaacactattaaccctgtgtatagtgtcaacagttaaagcagacgaaacgaagtaagctatatttctggactgaacaaagctctgctgtttagagcatttaagtttgtttagtggatccatactcaaaggaaagcataagcaaattttcctttacaatgcaaacatgccactggtggcagcacatggtaatttgtggattttttttttcatactcaagtaatggaggctagaaatgaagagaaccttctttttctcttgactttgacagcacatgctaaaaatctcttccaagaagtatgctaaagcttttcatttggttcctgttaaagttgttctcactgaccagcatggactcaggcaactggtaatgataagctatgagctccagtgcttttgccaaaattctcttgacagcacacctcctctctttccatgttatacaaaggacttctggcaaaatgattgagtccttcaagtttaaactaacatttggcaacagcaaattaaacgtttttaagatgtaaagaaagggttaccgcttgctaaggacttcagacaccatgtccgaaacctgttcctctcaagtgccctgttgtgtggaacacttcacatattggcgcacagtacgtaaggaggtctcatgtgctgtaggagtaaaaaagtctttgcataaaacagtatttatttttacttttgtgaccactattttagaaactttatttaatattttaatgttttcagtcattgctttggttatctataaaataggcttttgtgccctacttttcttcttgtagggcttggtggtgttttatcgattgtcagaattgtttttgaaagcctaagaacccagctttttagaaaggattttcacactggcatttctaggtagtgatattttcttccacttacctgctgaagcacatttatgcatttctttatggcaaaaccaaataactttagttgtggtctgcctgatactaccatagcacctcagtaccaaggggagggattttgactagttgaattattaagccaccacaataaagcagatttttaaataagaaataataatgttaacttgactgtacattgagatattctgcagctgatagagcagcattttaaaaatgtaacaggtggaaaattacactgtgcttaatgactgattttttttttaaactgcgagtcccttaagatcacgtttgtcaagtgtgtattcacacatttacttaaatcaagggactcaatgcttgcttttattttaaccatcttttactatttttagaaggaaactagctttagtagtgggttgccctatatgttttctctttttgctcttaatatgccattgggtttttgtgtgtatgtgattttcaaaattcatgacttgaagtgcaaggacagatctagatgtttgtttaccaagctatgtgacttctcccaaaggatctgtactttctttccttacaacagcttgaaaatcattattttaaaatccttaaatcactgtgtctagatcattttttacattgtgtgccatagacttacccatgggacaacagagctccttcatttttggacaactactgtaatcattttttttttaggaaaaatggaaggtgccgggggtaatcatggccagtcaataattatataaaggagttcaaatactatagctgtcagttgatgaatttgttatgtagtaaaatgtatgactttgtatgggtttcttcagccctttttctgccactagcaaccagaatagcactttaccttttggttggctagataagtggctgactacctgtttttctcactgtggtgtgattggctaaacaatctcgcattaaaaattcaaatgtaaattgaattcacatgaaaaatcatgtttggttgtaaacctccaatgttttgattctctaatcatgttttcgtcacatgctgagtaaaagtgccttacaatgtaaaaattgtacagtacttatgttcccaagtagcatcatcatcttctgggtagtaattacattgtggtattaatatttagaaaaatggacctcagcagtgtatttactgtacatctcttaagtccttaactgtagttttaataagcatgacattatttgataagtatataacatttacatcatttcaaaaaatactgccgttactgtcttttatgcatattttagcctgaaattttgaagcgtcttttttctttcttttttctttttttgttttgttttttgttattgatattaaacagtgtaatctttgcaagcgtatattgaagattattctggagcatttattgccttaccagaaatgttagtaggaaatgttctttagagtagaaagatagacttgagtttctatacttttaagaagagctctttgttcctgggggaggggggcagggggtgaattttactttcatctcaagttattaaaaacccacaactgaagtaaattttatttcaagaatcagcagttttagaatttcagatagtacttgctcagaagtacatgctactcaagatattaagagataacaagatctgtagatctgctattgaatcagaatctgtgtacttgaacaaatgtgtgaatctcaaatatctcaaagcaaaagaaaaagtgttctagagtgttgttgcttttttaaaaaaagcgctgaagttagaccaaggtatacagttttgttctaacagacatttaggttaattgtaaagataaggaatgcattatgggtcaaaaatcaaacattcctctcatgttatgtatattttgttcctgttatattggctttattttcaaaattgtagtttgtagtattagtttccttttattggtattcttgcatatactattcattcaataaatgacttatgactttcaaaaaaaaaaaaaaaaaaaaaaaaaaccccccccccttatctccccatagccccccaataccgcccgtatacacacttcgcctttaccccttacaccacccaaccacaaccgcggtcccctgacaggtccccactcattccgtaccgatccatccccccctatccacattatagccaagtagcgtcgaacgcgctgttatcttctttcccgctgtcctccc

SEQ ID NO: 7916 - DNA, 1752 bp, Homo sapiens
  misc_feature (1712)..(1714): n is a, c, g, or t
  misc_feature (1716)..(1716): n is a, c, g, or t
ggaaactgaatgggcaggtgctggtcttcaccctcccactcacggaccaggtctctgtcattaaggtgaagattcatgaagccacaggatgcctgcagggaaacagaagctacagtatgagggtatcttcatcaaagattccaactcactggcttactacaacatggccaatggcgcagtcatccacctggccctcaaggagagaggcgggaggaagaagtagacaagaggaacctgctgtcaagtccctgccattttgcctctcctgtctcccaccccctgccccagacccaggagccccctgaggcttttccttgcctgcatatttgtttcgctcttactcagtttgggaattcaaattgtcctgcagaggttcattcccctgaccctttccccacattggtaagagtagctgggttttctaagccactctctggaatctctttgtgttagggtctcgatttgaggacattcatttcttcagcagcccattagcaactgagagcccagggatgtcctacaggatagtttcatagtgacaggtggcacttggctaatagaatatggctgatattgtcattaatcattttgtaccttgacatgggttgtctaataaaactcggacccttcttgtgaaatcagttaaataagacttgtctcggtcacctgtgccctgtccagactcgaggcagtggtaacactgcacagtgctatgtggcttctctttgaggatttttgggttttgtaactaaattcttgctgccctcatactttttatgtattagaatcatattcgtattgcccttttaaaacattgggatcctccaaaggcctgccccatgtatttaacagtaatacaggaagcatggcaggcaccatgcaaaccaaggatggatggtgcagtccctgtgtcagtgggcggtggtttcctgctggactggaatcacccatcacctgattgattggctctgtggtcctgggcaggtgcctcataggtgtgtggatatgatgacgtttctttaaaatgtatgtatttaacaaatacttaattgtattaaggtcatgtaccaaggatttgataaagtttaaataatttactctctaaaaaaaaaaattatatccattttaactcatgtaatcctcatgtgagtattcctgttttacacttgagtaaactgaggcacagagaacataagttgcatgccataatcacacactgtgaaagggaaaaaaagaaggggtggcaaaacacggtcacaagccctgggtttctgaataaaagggaagcttgttatcctttaaaatcaagcctttcccagggaaaatagggcaatgcctttgggtggtttgaaagaaaagggaaaaaccccggttgcctaaaaattttcccgggggttttaaaaacctaaaggggtggatttttttttgggggaaaaaatcccccccccgtgggtgtggggggccccccccggaaaaaattccccccaggggcccttttttttatttggaaaacccccctctcctttttgggaaaaaccctcctctaaagatgggcgccccccataggggggcctctttccccccggggctcctctaaaaaggggggggaagaaaaacattttttcccccagaaggggcccaaaaaaaaaaccaccctgtttctctctaaaaataaaaaacacacaggggggggggtttttcccccccccctnnngnccccaaaaaaggggtcctaaccccccccattttttt

SEQ ID NO: 7917 - DNA, 5587 bp, Homo sapiens
  misc_feature (560)..(599): n is a, c, g, or t
  misc_feature (1460)..(1478): n is a, c, g, or t
ccgagacactgggaccacagcggcagctccgctgaaaactgcattcagccagtcctccggacttctggagcggggacagggcgcagggcatcagcagccaccagcaggacctgggaaatagggattcttctgcctccacttcaggttttagcagcttggtgctaaattgctgtctcaaaatgcagaggatctaatttgcagaggaaaacagccaaagaaggaagaggaggaaaaggaaaaaaaaaggggtatattgtggatgctctacttttcttggaaatgcaaaagattatgcatatttctgtcctcctttctcctgttttatggggactgatttttggtgtctcttctaacagcatacagataggggggctatttcctaggggcgccgatcaagaatacagtgcatttcgagtagggatggttcagttttccacttcggagttcagactgacaccccacatcgacaatttggaggtggcaaacagcttcgcagtcactaatgctttctgctcccagttttcgagaggagtctatgctatttttggattttatgacannnnnnnnnnnnnnnnnnnnnnnnnnnnnnnnnnnnnnnnctccacgtctccttcatcactcccagcttcccaacagatggcacacatccatttgtcattcagatgagacccgacctcaaaggagctctccttagcttgattgaatactatcaatgggacaagtttgcatacctctatgacagtgacagaggcttatcaacactgcaagctgtgctggattctgctgctgaaaagaaatggcaagtgactgctatcaatgtgggaaacattaacaatgacaagaaagatgagatgtaccgatcactttttcaagatctggagttaaaaaaggaacggcgtgtaattctggactgtgaaagggataaagtaaacgacattgtagaccaggttattaccattggaaaacacgttaaagggtaccactacatcattgcaaatctgggatttactgatggagacctattaaaaatccagtttggaggtgcaaatgtctctggatttcagatagtggactatgatgattcgttggtatctaaatttatagaaagatggtcaacactggaagaaaaagaataccctggagctcacacaacaacaattaagtatacttctgctctgacctatgatgccgttcaagtgatgactgaagccttccgcaacctaaggaagcaaagaattgaaatctcccgaagggggaatgcaggagactgtctggcaaacccagcagtgccctggggacaaggtgtagaaatagaaagggccctcaaacaggttcaggttgaaggtctctcaggaaatataaagtttgaccagaatggaaaaagaataaactatacaattaacatcatggagctcaaaactaatgggccccggaagattggctactggagtgaagtggannnnnnnnnnnnnnnnnnntactgagctcccttctggaaatgacacctctgggcttgagaataagactgttgttgtcaccacaattttggaatctccgtatgttatgatgaagaaaaatcatgaaatgcttgaaggcaatgagcgctatgagggctactgtgttgacctggctgcagaaatcgccaaacattgtgggttcaagtacaagttgacaattgttggtgatggcaagtatggggccagggatgcagacacgaaaatttggaatgggatggttggagaacttgtatatgggaaagctgatattgcaattgctccattaactattacccttgtgagagaagaggtgattgacttctcaaagcccttcatgagcctcgggatatctatcatgatcaagaagcctcagaagtccaaaccaggagtgttttcctttcttgatcctttagcctatgagatctggatgtgcattgtttttgcctacattggggtcagtgtagttttattcctggtcagcagatttagcccctacgagtggcacactgaggagtttgaagatggaagagaaacacaaagtagtgaatcaactaatgaatttgggatttttaatagtctctggttttccttgggtgcctttatgcggcaaggatgcgatatttcgccaagatccctctctgggcgcattgttggaggtgtgtggtggttctttaccctgatcataatctcctcctacacggctaacttagctgccttcctgactgtagagaggatggtgtctcccatcgaaagtgctgaggatctttctaagcaaacagaaattgcttatggaacattagactctggctccactaaagagtttttcaggagatctaaaattgcagtgtttgataaaatgtggacctacatgcggagtgcggagccctctgtgtttgtgaggactacggccgaaggggtggctagagtgcggaagtccaaagggaaatatgcctacttgttggagtccacgatgaacgagtacattgagcaaaggaagccttgcgacaccatgaaagttggtggaaacctggattccaaaggctatggcatcgcaacacctaaaggatcctcattaagaaccccagtaaatcttgcagtattgaaactcagtgagcaaggcgtcttagacaagctgaaaaacaaatggtggtacgataaaggtgaatgtggagccaaggactctggaagtaaggaaaagaccagtgccctcagtctgagcaacgttgctggagtattctacatccttgtcgggggccttggtttggcaatgctggtggctttgattgagttctgttacaagtcaagggccgaggcgaaacgaatgaaggtggcaaagaatgcacagaatattaacccatcttcctcgcagaattcacagaattttgcaacttataaggaaggttacaacgtatatggcatcgaaagtgttaaaatttaggggatgaccttgaatgatgccatgaggaacaaggcaaggctgtcaattacaggaagtactggagaaaatggacgtgttatgactccagaatttcccaaagcagtgcatgctgtcccttacgtgagtcctggcatgggaatgaatgtcagtgtgactgatctctcgtgattgataagaaccttttgagtgccttacacaatggttttcttgtgtgtttattgtcaaagtggtgagaggcatccagtatcttgaagacttttctttcagccaagaattcttaaatatgtggagttcatcttgaattgtaaggaatgattaattaaaacacaacatctttttctactcgagttacagacaaagcgtggtggacatgcacagctaacatggaagtactataatttacctgaagtctttgtacagacaacaaacctgtttctgcagccactattgttagtctcttgattcataatgacttaagcacacttgacatcaactgcatcaagatgtgacatgttttataaaaaaaggaaaaaaaacatttaaaactaaaaaatatttttaggtattttcacaaacaaactggcttttaaataaatttgcttccatattggttgaataagacaaaaacaattaaactgagtgggaagtgaataaaaaaaggctttaggtatcgattccatatttttcaaagccaaatatgtaaatgctaaggaaagtaaacaaagaggagattccaatcttgtaatttaatattgttattaaaactttaatgtatcctattctttaacatttggtgttaatataaaattacttggcaatgcttgacatttgaaataaacatttttctattgttttattgcaagtggtccaattaattttgcttagctacagtttggtcataaatcaagtgagtttaaagacactaccaagttgttaggtgcccagagaaaatttctcccttttaaaaaggccaggtgatttttcaaatgtaatcttgcccccaaagtaatatccgaatatctttttgacatgtctaaatatatatatatatataaagaaatatttgttaacacaaaagcatttgatctatgtagataaatgctaatagatttaaaaagctaatattaacaaataccagaatacgtgaagttccatttttaaagtgtttgagcttacagaagagaaacattcattttaaatgaagtaaaaaatgccttgaaagtaattctttagatagttgcccattgattaaattccaaaaactaaatatgtttttagctttaaaattataaaagctgtcataaactttatatattatgaattttaaaatatgtttgagtctcctgcaatatagtttcatcccattgacatcaattaaaaataaccctaatatattatttttatatttattcctcaggtggaatggctattttaatatgcccagtgtggataaaatgtcacatttctgtaacttttgactaaagagcctatatttatctagttaatgaatttaaaggatctatctttcccttcataaaatacctcttatttccattaaagccccccaagtttaattaatttaggattttgaatgattattgacatccaatagttatttttaatatttgtattcttgttatttctggaagaaagcctttgtgtagcacttggtattttgcaaagtgcttttaaaacattcttacttaccgtatttcatagaagggaaggaaaaatgtaaggtttaacagtaagcacttgcattgaacatggaggcatgtggtatcatgatattcttcactaaatttagctgtccctaatcacagatcctaaggtaatataatataattttagtgcatttctcctcatcaggaatgctggaggtgcattttaagttttaataataagtgctagaatgaccaaattgcagactaattgtttccatattgtacttaaaatgagtttttaaaagtgaaaaagaaatgactatatacaatcaatgctatttattgtacctctgggcctactcttctaaaaattgtagcttatcgatttttctctgtcaagcttgaactaatgtaaataattgaaataatgtaaagttatattttcatgtttttatagatacaacatgacaagaatacataatgtaagagtatttcaactatggataatgttgattggataatgcacatctcagttacaagcagtactcatagtttaatatccatgtaacggtgcatcaatatattgctatataaatatgtctgtgtgcatataagtgaaaagtggtcaaacaagagtgatgacagctgtctaaaggtttttttattcattttatataaaaactgttatggaaagaccaaaatgtttatgaactattcttatgtaaatttacaattgtcctttactgtacttttttgtttacagtatagtaccttattttctgctgtgttaagtgggtgtcaaactccaagaagacatacactttctataacttctattgaagatattggaatttccaatttttcatgtgtactatgtcagaaaatgctttcgattttatttttaaatctaacatcggatggcttttccggagtgttgtaaaaacttcaatcatacataaaacatgttcttgcaaaaaaaaaaaaaaaaa

SEQ ID NO: 7918 - DNA, 1218 bp, Homo sapiens
ctcgcaaaagcgagtggggaccccccccctgaagaacggaatctcccaaaaagggggcgcgagcccgcgcccaaagaaggttgtgggacaccccacaattggaccaaaagggtattaaccgaaaaggtctcgggacgggggtcccccacagtcgatcaacaccaaacggcggaagcaccttactggcgggacctacaacaatggcagatgtacggaactaaatttcggattctatgaaaggcgaagattaccgccatatgtgatcatacttgcctgcacaacatgacttccaaatgacctgacagtgttacagagggacttgaagctcagtgagaaaaggatgatggagatagccaaagccatagaggctgaagatctccaaaagaagggtgtctgtggccgccggcagtgaagaagatcactaattgggcaccctgtccctcccgctgcctccagcccagacctcagaccgcctggcaaagcggaggaagattacctagacgcatgctttccagacagggcgttttggctgcatcacagccactggctggtcctattcatttccatttttatgtatgttttgaaaagaaaaggtccggggatggtggctcacacctgaaatcccagcactttgggaggccgaggcaggaagatcattgagctcaggagtttgaaaccagtctggacaacatagggagaccccatctctaccggaggaaaaaaaaaagagtcaggcctggtggtgtgcgcctgtaatcccagctactcgggaggctgaggcaggacgattacttgagcttgggaaatcaaggttgcagtgagctatgattgtgtggccacactccatcctgggtcacagagtgagaccttgtctcaaaaaagtaacataaggaaaaaagaagccttgctttagcacaggtatgaagccagaagccagcatctcaactgtgcttgtcttatgcagaaatataaagcgatggccaggttggacttcaaaaaacaaataactgaaaataggcgcatagttgcgaacacagacacaaaaaaaaatttgtttggggcgttggccgaaaaaagctttcaaacactttgttgggggcggccacaatgttatgcacatgtgcaaagggtccaaaagattggctagacatgcgtggcttcacaaaaaagcggggacggggttttagacctcagtggtgggcatggatcagagacagg

SEQ ID NO: 7919 - DNA, 2991 bp, Homo sapiens
  misc_feature (858)..(888): n is a, c, g, or t
tgcggcccgggccgaggaaggagaagtgggatgaggggggagctcggcgtcccgctccctccgcggctcatggcgacgactctcggcacatccgggaccctccggccgtggcggccgaggcgccggctgctcgggccccagccccggccgctgtggtgactccgccgcgcctcgccgtcgcccccgtgccgcccgccgcccccgccgcccccgccgccggggacatgtctaaccccggaggccggaggaacgggcccgtcaagctgcgcctgacagtactctgtgcaaaaaacctggtgaaaaaggattttttccgacttcctgatccatttgctaaggtggtggttgatggatctgggcaatgccattctacagatactgtgaagaatacgcttgatccaaagtggaatcagcattatgacctgtatattggaaagtctgattcagttacgatcagtgtatggaatcacaagaagatccataagaaacaaggtgctggatttctcggttgtgttcgtcttctttccaatgccatcaaccgcctcaaagacactggttatcagaggttggatttatgcaaactcgggccaaatgacaatgatacagttagaggacagatagtagtaagtcttcagtccagagaccgaataggcacaggaggacaagttgtggactgcagtcgtttatttgataacgatttaccagacggctgggaagaaaggagaaccgcctctggaagaatccagtatctaaaccatataacaagaactacgcaatgggagcgcccaacacgaccggcatccgaatattctagccctggcagacctcttagctgctttgttgatgagaacactccannnnnnnnnnnnnnnnnnnnnnnnnnnnnnncagtcttcagatcccaggctggcagagaggagagtcaggtcacaacgacatagaaattacatgagcagaacacatttacatactcctccagacctaccagaaggctatgaacagaggacaacgcaacaaggccaggtgtatttcttacatacacagactggtgtgagcacatggcatgatccaagagtgcccagggatcttagcaacatcaattgtgaagagcttggtccattgcctcctggatgggagatccgtaatacggcaacaggcagagtttatttcgttgaccataacaacagaacaacacaatttacagatcctcggctgtctgctaacttgcatttagttttaaatcggcagaaccaattgaaagaccaacagcaacagcaagtggtatcgttatgtcctgatgacacagaatgcctgacagtcccaaggtacaagcgagacctggttcagaaactaaaaattttgcggcaagaactttcccaacaacagcctcaggcaggtcattgccgcattgaggtttccagggaagagatttttgaggaatcatatcgacaggtcatgaaaatgagaccaaaagatctctggaagcgattaatgataaaatttcgtggagaagaaggccttgactatggaggcgttgccagggaatggttgtatctcttgtcacatgaaatgttgaatccatactatggcctcttccagtattcaagagatgatatttatacattgcagatcaatcctgattctgcagttaatccggaacatttatcctatttccactttgttggacgaataatgggaatggctgtgtttcatggacattatattgatggtggtttcacattgcctttttataagcaattgcttgggaagtcaattaccttggatgacatggagttagtagatccggatcttcacaacagtttagtgtggatacttgagaatgatattacaggtgttttggaccataccttctgtgttgaacataatgcatatggtgaaattattcagcatgaacttaaaccaaatggcaaaagtatccctgttaatgaagaaaataaaaaagaatatgtcaggctctatgtgaactggagatttttacgaggcattgaggctcaattcttggctctgcagaaaggatttaatgaagtaattccacaacatctgctgaagacatttgatgagaaggagttagagctcattatttgtggacttggaaagatagatgttaatgactggaaggtaaacacccggttaaaacactgtacaccagacagcaacattgtcaaatggttctggaaagctgtggagttttttgatgaagagcgacgagcaagattgcttcagtttgtgacaggatcctctcgagtgcctctgcagggcttcaaagcattgcaaggtgctgcaggcccgagactctttaccatacaccagattgatgcctgcactaacaacctgccgaaagcccacacttgcttcaatcgaatagacattccaccctatgaaagctatgaaaagctatatgaaaagctgctaacagccattgaagaaacatgtggatttgctgtggaatgacaagcttcaaggatttacccaggactctatttatacaaccctgactgacagcctcctttcagcagagtttcaaagaatatgctgaaatacaggaaaacactccccccccccccctttttttttttttttttacattttaggacactgtgaggggaaaggacaattttgaaattccttttcaaggaaaaaaaaggtctttatgctttgccatgaggccacattcagctgctatttaaacttaatatcttgaacctaaagaatgctgacttttcctacatttccagagttaggcagtattctacacttaaagactactactatttttataaaaggtaatctattcaaatttcttcacagatttcaagtctctcaaacatcaagacaacttcagcagtcggtacaagtcacatttcattttgattgaatacatgatcttgaacagctcctgtacttgctctttgtaaaaaaaaataaaattattttgaattattcaaaaaaaaaaaaaaaaaaaaaaaaaaa

SEQ ID NO: 7920 - DNA, 2530 bp, Homo sapiens
  misc_feature (33)..(33): n is a, c, g, or t
  misc_feature (283)..(286): n is a, c, g, or t
  misc_feature (288)..(288): n is a, c, g, or t
  misc_feature (293)..(294): n is a, c, g, or t
  misc_feature (325)..(328): n is a, c, g, or t
gctcgtggaaaagcctccccccctttctggggnggagttttttgtttaaaagagagaaaccccctttggttgtttcgctcgcccgcgcgggggtttttttttttgtggggggggggaggtaccacagcccctttttgtttttttccccggggtgtttctttttggggaaaacagttttgtgcgccctgtgtctcctttccccgcagggggcgcccccgggcgcccaaaccaaaagggttttgaaaaagtttttttaaggggcgccgggggggcccgcacaaannnntnttttnnttttttttttgtggttggggggtggtgtgtnnnnttttttttgggtttttttttcctctcctccctttttttgttttttttttttatttttcaaatagtttttttttttttttttttttactactcataacagtttatttttactttgtacaaaatacaaaaatgcaaatccaaggagtacagaccagtagtgacaggcacactgcacaacagcaaccttgtctagcaagacaggagttttttaaattttattttagtgaatacatgcattatataaaacaacaacaacaacaacaacaaaaacacaaagaggctagagatttcaccgtttctacccccaaaataacgcttgctatcaagactttggagggggatgggggaaaagaatttaaaaggcaaataatttttttttcataaaaagtaaaagctaccataaaacatttttttttctgtcacactgattaaatttcttctgaaaagccgcacatatagacaaaacaaaacaaaaattcctgaactggacaaacagcaaatactcaacagggttgttaacctaggtaacagttcagtagtttaaagaatcttttagacatctggaagcctttctattcattcctcagtacagtgttccagccatcctgcttgttttttccctccaatacctcccagaacagaaacacttgcatcgagtctgttcctaagaactagttttgaaaaagaagcgatgtacaaaaatatttaacagaactatgaaagatgcaggaaaggagtctttcttcgtagcaaagtagtcgttgctttgcatggtttcttttgtatactcttcagggtttgtttatctgccccatgaataacacagcacctgtaggattatgtcggatgaaaaacagaaaaggtctgtctactataaaccagggaggcgatgatcttgcaatgagaattgcagttgttgctgctgaagctttggttccatcttcactgacttcaatttttgctttttgcaagatatgagaaacatggaggttttctgaccctgttgttatttttgcaaaatttgcctttgatgaatcaaacatgtcagtaatgccaagaactttcagcggctccttcaaatctgtttgtgctacagctgtgaacttgggcaggatcacctgcaccctcttgggcaccatgatgctcatccagctgtctatggtcttggtgctgatgtgtgggatgatggcagacagcggagtggagctctcagtcggcagtgcaatcagcatgctgatgctttccccgtggtagggcagttcaatgaagttgtaccataaatcattgggggcacttgtcgacccacaccggaacacggagagctgggccagcattggcacttgataggatttcccgtcggctgccacgaaagtgcgtttctttgtgttctcgggttggaaccgtgatttccacagacccttgaaatacactgcgttgacgaggaccagtctggtgagcacaccatcaataagatctggggacagcagattgtcaatcatatccctggtttcatttttaacccatgcattgatggaatcacaggcagaggctggatcctcaaagttcacattccggacctcacactggaacacatctttgttccttgtaacaaaaggcacttcaatttcagaggcattcttaacaaacacggcgttagccactgtcacaatgtctttattcttcttggagacgatggccttgttgatcttctttaatagtttaccaactccatttacgccgtatctcatcaccatggcgagctgcttcttggtcctgccgtccgcccccagctgaagcatccccaggaccgacgcaatcccatggggagagatcacgatgttgtcatgaggcctcgacttcacaatctgattgaaaacctggatccccgtgttggagcctagttcctcgagagacagaggattgaagtgggagcagatggaaggcagcgtcacagaggccaagaggaagagggggagatgccagttcatggttccttccaccaaggacgaccgcgctcgctggatccccagggggcggccgcggagggcggtgcggccgcaaccggagcgggagcctggtctcggcggcgcggggagtcggaggacgcagccaagcggcgccggcgaggagggtcacagccggaaagaggcagcggtggcgcctgcagacgccgcgcagcccgggcagccctcgtgcccccgct

SEQ ID NO: 7921 - DNA, 522 bp, Homo sapiens
gtgatgaggttggtaccattctcgtgatctttctgctatagggtaacgtatacacttcccatcgcgtagttttcctgctcaaaacttttttctgactcctcccaacccgcactttttaaagtccttaccgcgaggcggattcccgccctgggcgcctcccagtcttgtcttaaggcgccgtcgccccccacctccctcctcgttccaggcccttatgctccccaggtctccccaccgcagtcaccgcttaccctgagcccgcgttggggaggtgcccggggctgtcctatgacaccgggtgttcttgcctgccctgcaccagcccctggaaaatgcgctcctccgggatgcaggcgtcttactccaaagccctcctgtgattgtgttggccaaagggatcaggagactgagagagagagcagtagaaaacctgagacagagaaaagaagaatgagaaaggccataacagatggcaaagtagaggatgagtgagggatttgccaagagagagcaaaagtggaa

SEQ ID NO: 7922 - DNA, 1456 bp, Homo sapiens
gaaacactaactcatacttctctttattggttgcaagtggcacgcaggaacagagggagagtggggggctggtgggggaggggagattttttttttttttttcttgaatgtgcttcgcaagccaggctatcttccaaggaaggcagacagtgggagagcagagggactgactgcaggcaagcacattgaagaaagacactggcgggtttccccaccctcaccccaaagcagaaaactagcagacgtcagctcagccccgtcctgggcacagacactacacaaggagacgctggaagttaagcaatactttaatactgtaatatgtttgttttctttttctttcttttttttctaccaaaaaaaagtaagtaaactaaaacacaaaaacatataaataaaatccatccctcttgtcggggacctgcaggggggcaaccttaatccaaacacctggctatcaaataatcagaatgtattgtctcagacaggatttcagttccgggaggcaggggcatgatgggggagggggccggaggctgagagacaaaagttccagagcctccctcgaaggttctctactactgtattctgtacataatgtaccatcccatgtggaatctgtgagtgtcctcttaagtagcgtgggctagccaatctgccgttcatggtgtattgtaaactccgaattccatatgtaataggatgcaagtctaagcgtttcatgtggacataaatgtatctaaataaaactttccctagcactgtggctgacctcacccttacttttatactttagtatgaaactgatgagaactttggtagtgagtattttttttatatatatacatatatatgtactatctatatatatatctcaagcatctttcaggtctttgtgtgtggctttcttaaagccctgttgtaaaaaattactatgtggatggcagtctctcacatcacagatgtggaaagtataattttatatttgtattttcaaataaataagtttgtgaaaggtttccatcctctactgtggtccagaaatcaatgtgtttgtctgacaaaaaaaaaaataaaataaaataaactgttttgaaaaaaaaaaaaaacacaaaaaaacaaacaccgaaaaaaaaacacgcgacacagaaaaaaaaaacaaagaaaacaaacgtgtgaggcggagcgcgcgcgagagaggcttaaaaaacaatgagggagaggcgcgcacaagagagtgaggagagaacagagcgaacagggttgagcacagagagaacacagtgacgcccaacagcaagaggagggaggcacctcccaagaaaaaaaacccccgccgggagaaacaaccgaggagtcgtgaaaacaacacaacgcgaggcgactgggccccgaggacgaactacaaacgaggacgcacacagaggcagggataaataacccggggcggcggtgt

SEQ ID NO: 7923 - DNA, 3876 bp, Homo sapiens
ctagaggctgaatggaggctggttttattttgcctttccctcaccgcccagtcccattgagtgtattcattactagaaggaaaatctttcagaattggtgacacatggtaggctgtcttaaggagtcccctggcccccttcccctaggccatggcctaataaaataaactgtcaattgttctcacagcatatcatttaataatgaatactttagaacaatgcttatgggctggagaattgtatttgattagcccattcagtttgatagcccaaatgctgaacagcacagcgggatcctagcagtgcaagttcaaaagtaagtccaatcatttctgtgatactcgccctggtagcaaacagatcatctcagccaagctcttcatgtatctttgacctattaggtgaacaaatgaacctcacaggacacacagtattttttaaaggcagactcgctctcttttttgccagtgagcagttctagctaaccaagttacacactgtgggtattcctgcctgcctcttgaatacaaaggcctagttcaagtgttgctttttttatttcaaatcaattttttcttctttcctttttgagataaaactattaaaagtactactatatatataaaatctcaaatcaacttttcggcctcctcctcgtgtaccaggaagtatattctgacgaagggccccacttttgcaggtcttgcacgcccctcccttacccagaactgcagagcttcaggatggcgaaggtcacccaagggcatgagtagggagtggtgtctccaaccatcagttccgtggcactgttcagcctttgtgtgctgccctgccacccaccactcacagtgcctctgaagcgtgttacccctggagtgacgtgagcatttgaggcttgtctaaggaaaaaaataaaaggcagtgaaggagactgtacataaagacatggcaaaaatcttaattatagcaatatagttatcgggtaatgttcgggtgggcagctccattaaaaaatatgtgaatgaatctgtgaagctgcaagtagcgagaagagcgaaaggtcttcttaatgaaccgcctaccttgtagacagtaatttgtacactgtatagttttgttaagaattttttttaaattaaaattcccatgtttgtaaagctaactttttaacaattataatggaactatatgttgtttccatttttaaagtaaacaagaatattccttgtttagagactggacttgagttaaaactctccagtctcttaagttatgtattaaaaagaaaatctgtccatgttaggagttatttcacagattcctgtgcttgaaaagcataggatactaatcctttaaaaaagtgtaaatggagaaaagttatattttatgaaggttattttgttgtatttagtattggaaaagttggtttccagagcatttcagaatgtcgaagcaccactgtctttttattagtatatacggcctttagcaaaagtttttgtgattgttacgtgatggtatttaaggttaagtttcacagagcattcaggataggcagaaaactaaaacagtgctatgtctcacataacgtgtcctcagggagcagaatcttggatttgtgacttgtagcttcataaggactcaacgaaagagattgcacagggacatcttcagcggtgtgacagcaggacatgttctttacctagattcaaattctatgtactgtgtgaaatgatgaaggctgcagaaagttatcccatattcagtgtacagtattcatttttaatgaaacaactctacaatattgctggcagataggccccaagcatgacattcaatatagtttacatgttcctgtcaaggtcttttgttaacattaaccagctgcatgctttctggactttaagaaattgggtttctatagaaaacttttttttttttttttttttaatgtgcaggctattcaagttcaatagtaaaagctcaaaaatgaatgttctactccatgctgaaggagctgaaagctgccttcttcatattttgcactttctggtagttcccctgttttttctaattccctaaaattgtgtgggtggagtggagccctgcagttggggggtaacatggaccactgattttgccctttgaccctgcacaatgacctttgcatcagccaaactcattgccatgacaactctttgtactgtgtccgtgccacagatctgttggtcacattgttaatagtaaaggggacaagttggagacggtcaatttttacattttttgttgcaattttttcttcaatggttgtaagtagttttttttttttttaataataaaagggttcactagttaatactctagaaatatctgtgtgttgcaattcaaatgtatgttgagattgtgaaaagcgcttcagtgccactagcttaccggtacactagactaagcccttgatgacttattgcatgatacagtaccaggaacaacaggtggcctaaatacatgaaaagcagtgtaagctagtgacactaaagccagtcttgtattactgtatttttgacagaatggttttgaaaactgtgctacagggactgatgtggcaaatatatctctttatgcagaaggaagtctttttttttcttttttttttttttaagaagtatggctttttatgcatccttcatcgagggcattgaagttgcatggactgataaaagttgatgcaaaacaagaaagaaacaaacaaaaaaaaaaaaccagcaaaatgtttaccaaaaaactcaaacaaatgagcagtgcctgttcaatttcacagtctctgttgagttcagttgtaaatatgtttcaaatgacattttcttgggaaaaaaaatctctacaacattgtagaatgtgaggggtaactacatcccaggcataggtttctcaaagctgcagtagattatgtcttcatcaagctgttaatttgtgcttatatcatatagaacttttagcatcctgggaagagctgcccccacctcaatgatatttctctgagaacaacttttgtaggactgtgtgtttctttagatacatttagtacaactgtaggtgacgagtagtcagttattgcttgctagctacacaccagggttgatccattttaaaacttttggcattttgtcctcatgggccataaatacagaaccttgtattttaattaaatttttttacaaaaggaggcacatgcacaatctccatgtaacaaacctttagcagtaggatgtattatacgacagttacttaatttctagagttcaggcctctgggatcaaccccagactgggccagaatgttagtgaaggttttattgtgcccggttggaggataacgttctttgggtactttttgtgggttgcaaatgaactcaattgccacaagttttaaactggtgtaaatcaagcttgacttaatgtgattgttactgttatatccagcctatactgctagcagctgctcatactgcagtcaattactggaagcggatatatttcctatgcaaaaactgtttaaacaataaaatgagctatgctacagaaaaaaaaaaaaaaaaaaaaaaaagaaaccaatggtggggggggcgggaagcacaggaggttactggaagtgggcccagtgggcataaggtgttgtctagacccaggttccgggtaccacgggggacgatcggcgggtccccctatagagagtcgaataatccgacagcgcagtacttgctagacatcgggaacccgacagaccggccagaccagagcgcaggcgcggttacactctgccaccaaatcggacagacatggagaaacaaacgcaaccaagcgagacacaagatccatc

SEQ ID NO: 7924 - DNA, 6983 bp, Homo sapiens
  misc_feature (5550)..(5583): n is a, c, g, or t
ttttttttttttttttttcatataaatatgttttattgcagagaagttataattatttacatgctgcaacacgtcacaacataaatttaccaaatatttcatggtgggatgctgtaggtttcagataatagttttaggagaaccacagattaagtgaagacacttacagctttattgactctacgactctcggttgctaaatgctagaagtcaaaaggcagtgttttttcagtcctacctgtcataacttgcatgcagaaacctaggaagcaaatacaagagaactgtcgagtttcaaatccatattgccaccaaagtttacaatgggttgagttatacttcatgttgtaaagcatttaattcttgcataaaatatacaattctattaagattggtataaatctacttatttataaaccctggcttaaaaacaaggacaggatgcagcctgcacatgcattgagaaggacaacctagcaaatgtttgcgaccttaaaagtgtttattcactttctatggttatcaatctggaaaaataacctcctgacttgtaaatttcaacttctcttgttgataatggcaatgaaactctcagaaagactctaggcactctcactgatttatgctggtggagaataatctatgaactatagaatgtcgctaagatataatttggcaagtctttttaactcacatctctagcaggatcaatcctgaagtgcaatagaaagtcactgatgcttgactgcataattctcaagaaaggaatcaagtgctaacagatttcagacataaatgaaacaaatatgtgggtctaggaacttccaacccagttcacaaagattccttaaaggaggtcaccaagcatataggccttcattgaaaaggaagagataaaagaaataaatggtgtaaagacacaaaaatagaatttctatatcttctcaaaccgaccccaccaacctgagtaatgcataaagtcagcaaatgggtgaggaagatttgcgcacagctttgtgaaacagtgaagtgcttgcttactcctgaataaaaaaatcactgagaaaaatttgatgatgaatatggagaattctgtttttaccttccactgaaaatactctctaagaacagccctatatccaccctctgatcctgtttctccatcttttatcaccctagcatgtcctccttgctgattgtgacataaaaaatagttatttgtgctgggagtgtcctggccaaataagcagttgatacttgggtgtttacagggagaaaaagggaagtctcggttctatttctgagtgattcttctttaaatgaaatgagactgagctttggaatctcactgcatgatcatgtcggtagggcttagtcggcagcttaggattcccatgccaagagatcagtgtggaatgcaataagctttataaaatatgctttgggggctgctttgctttgcaaatggaccttacatgttacatgtcgagcaagtggctcacaatggcaatttgcaggacttagacattttccagtgcttgggagaatgaagattccataccaccttataggttttgaataaataaggttataaaacctctttgggatttgagcccagcaagttctacctgtagctgaagcaatgaataagagtttatgagaataaatactttaaggtattttaaaatactgtattttcagtacacataataaaaatatatccatacaatgatcttgatgctaccataatttttctctttaaaaaaataatcccttgaaagtgctatcaggagctacctgtgtttttttttgaaaggcaaacttcctgggtttatagtactgctataattcttatgtcatccctagagtcttccctttccaatagtaataataatgcacggtatatttttctcactcttagcttcttcctttggaaatgctgctaagtaggaaatactgaaagagttaaaagggacaattaattggaatgaaggcgttatctatctctgactttgaataaacaacggataagttgtccttaacttattgagacatatgactaagtaggaccacttgatctccaatattaataaagcttctgagtcctaacaagaagtgcaaaacaagtaactcaacttgtataaaaaaccctgattaagacagtataacaaaccatgatgtgaaataatagagtcaaattcaaagtcacaatatataaaccacagccaaaactaaaagtttttatagtaacagttatggcttcccaagccagagaaagcttactgtacttcaagaatcaactaaagttgatagatagcaggtattctgtaaggtgcaataacaattgaatagctgcagattgcataaatgtgttgtgtcacataataccaaagttatttgcaaaaattatacaatctggaatgcttgaatatgagacacaacgatatactgaaacatacatttataagaaaatgagagcaatcattaatataaaagatatttttgggatgcattaagttagcagtgctatcaaggttaaataggtaaagtaagttcttctcggtcagctacttagaatttcagttatatatgtcttataccttttctttctttgcaaatctggtacgtcttctgtgtctcctggtttacctggcttaggatcttcaaagtcccatggatacatattgatcagggcagacattgtgggctattttccttaaacatgctgaaatggaaagattttcctagtgttaccaagggaaggactttcttgaccaaagtctgacttctccattatgacgttgttgctcttgcccccctggtcctcttctacccatgcctttgactttacctcaccatctgtcatgttttccttgattgacaaatcctccttgggaatatttgattcttatatcttctgtctcatatccaatccggggttccctccttttcctcttcttcctggagatgctacactttaaaactatcccagatctcttctttcctaggccctgctatcttatttgcacttagagcagaagaggcaggtaaagctacacttcttccagcatttggttgagctggggtctcaaactcccaaggacaaacctctgctcgtgatgttaaaggttgctggaagttattacttgagttataggagccacgcacattctcctcagaagaagatgtctttttttcctggtgtcctatttggttgagattttcattctctgtttttgatgctacagctttggggggcagttcttcgctctgcccagcacacacattggctgcacgaggctgacctccgttctcctcttttgccctctctgggagaactggagtcttggaaatcaaaagcttctcatcttccaaaatggactggccttggctctcccaaaggcatacttcagccttatctatgcgcttctgattggattgctgacaaacctcagctgccttaggcttgtggtgagatttctcctttaaggaaaaagtggggtttttctccatttcagaagccacaatagatacgtgcttttgaacttttgattctgaaggcacaggaccaggggtcaggtcataaacctcccaaggacacacctccccaatgtcaaagttgtccttcatctgggtggtgcctgggttcaggtcagaattggcagtggtggggttgaccctttgttgtttcataatcccagatttctgaggctttcttggctcctccgcaggatttgagttttggggggcaggatctttagtctctgtgttatcagaatttgagtgatttctgtttgtctctttatcttttggcaaaggtttctgggatttagtgcgttcttccacacctgctgtttgggttttcccagctaatccaagagtcttctccttggcgcttgctatgacactgagagacttctgtaacatcgatgttcgtgggtgcccagttttcttctctgagctgaggttgtgagcgcttgctgacttgcacaccaacggcaccgactccgtggactcagcctcgctgtcttcttttagtttttgtgttagttttttacccgacagggattccagtgtggaattttctgttgtctcctcctcttggctttctgtgggtaggctactggactcttccgtttggtctctcacgtggtcataagtgctgtgggatttcttgagtgagaagactcggtttttcagggtctcctccttggatttccctgtgttccctgaagactctggggggttcttcctgatgagggcagtgcctttggctgtgccatggtcggcgccctccttgtcctctttagagcactgccggctgactgtctctgggatctccgtaatgcgtctcatgatggaacgacctaggcccttcttcgagcaccgctttttctggaggtgggggttgtttgtgatcatcttctttcttttatatatttccagttgggcatagagttttttcagctcgtcccgaatgtcctctggatccaagctgtgctcactccaggctgaattgatactgctgttcaggtaggatccagatcggcccatgtctagctcatcctcatatgcttctgtagcaatatcatctcgtgggttattgcttgaatgtgaaaactttggaatcaaaagcaacccaatggtgactgtcacagtcaaatgagtatgtgcaaaatacagcatcaacatccaatcagactgaagtcttgaggcaagaacaaatctgaattgtgaattgattgagttaacaatccaagattatgattgtgaattggaacagctatgattgcttgggatcatgttttgccgatgggactgtccgcactgcatagcagagataaacaccccacaagaggaataaaaattcagcaactgctgtcatgtagtcccagcggtcaatgaggcacatattgaagatgaggtgatcggatgttttcccctggccaataagtgaaatctgtttctccaaattctggcacacagatgaagtccagccaatgagaaaccaaaacactaccaagagtattactgccagcatcctcatgacccgtccgccagtcatatatggaattcgttgagccgttcgtgaaagaaacaccttcaaaaccctgtgaagtttgagagtgacagttccgtaaacagtagcaaaaccgagaagacgagcccatcttaggagaatacagcgaaatgtgcttggctcaaagtacaaaataacaactggaaagtataggagcagagatccaaaaaggatcgtttccaacaggataaggcccgatgcccggatgctctttgctttgcgaaagtggtagaccaccagcatgctaacgaagtcgagcagcatacacaggccttggaaggagatgatggcaagtcgtaaatacttatcttcctggacgaagcatgggctgtcatcagcacagaaggggcagccctccctgcaaggtaggcagacataggcttcttctgacacatcttttgtacttcctgaaatatgctgatccggaccccttctccgaaagttgttcactggtaagactccaggatgannnnnnnnnnnnnnnnnnnnnnnnnnnnnnnnnncaagaacgaatcctaggcctttaattggcatacactctgaattgttgaggtggcatttatgagttcctgaaaaccagccatcacttgagcattggtcaatgtccactttctgaagatttatgtcaactttcatgacacccctgaattccgggaccaggttaggctgcaacccgtagatggcagaggaaagagtaaccagccacccgggcttgtaactcccgttctcgcactccagataaggcggagaccacttgaagtggctcttgtccccgccgagcccgtccttgcgccgccagctgtggcccaggccccggggcccctgattggggccgcggcggtgtaagtggggcctccacttgcgccggaggccgtggaaccactcggtctccagagtggcgttggccaggtggggtgcggaggaggacaggtcttggagcaggatgcggctctcctcgcgcgtggcctggaggaagacctgtggggccggtgcggacagcgaatcggtgctgaaggtgatggccgcccgggagatgctgggctcgccctccagaaggctccacaccagcgcctggtaccaatccaggtcgtcctgcaagttctgctcccgcgacttattgctctgcagcatcacgttgaggaagttggtggcgtgtgtcagtgtgtccagcgcccggtgcaaggaggggtgcgcgctggccagggctggccacttccccggcaggcccgccaactcgtagcggccggagcagttggctcgcttcagctggtgggagtccccggtgtagaggtaagaggccacgtccatgggcacctcctcggcgagtttctgcgccaagatggtgccatcggtggagcggctccagggagccgaggagtccgaggcagaggctcgacccggctgctgggcgtgcggcttccccttcggggtcctctctcgaggggaatccggccgtccttgggggtcgcggctggcgccaacagctcccaatcccagctgagcaagcaggaggcagaggagtaaggggtaagccatggctcccatctgcctcccagagagaagaggagggaacgggagggggggaatcactttttaaatttggatcgtcagtttctcaacagtcagactttttcgaggagtcttcccccttctccagatggcacccagtccaaaggacttgaaaataagaatgtttcgagattggccccgggtggctaagctaccgtcgcagaaatcaagtcacctgtggcagcgctggccgtgcccgctgcgcgaggggccggctggggattacgcacctcgcagcctggagccgagcgggttacatggcctcgcgctcccagcggctggagtcagcccgagtccgtctctcggcccggctgccgccaccgccgctctcatt

SEQ ID NO: 7925 - DNA, 2947 bp, Homo sapiens
agattgcgagccaggaggaggaagccggcggtggccccgtcagcagccggctgctgagaggccggcacgagggcggcggtcccgaggggcggcggccgcgctgctccctgagaacgggtcccgcagctgggcaggcgggcggcctgagggcgcggagccatgaagctgtacagcctcagcgtcctctacaaaggcgaggccaaggtggtgctgctcaaagccgcatacgatgtgtcttccttcagctttttccagagatccagcgttcaggaattcatgaccttcacgagtcaactgattgtggagcgctcatcgaaaggcactagagcttctgtcaaagaacaagactatctgtgccacgtctacgtccggaatgatagtcttgcaggtgtggtcattgctgacaatgaatacccatcccgggtggcctttaccttgctggagaaggtactagatgaattctccaagcaagtcgacaggatagactggccagtaggatcccctgctacaatccattacccagccctggatggtcacctcagtagataccagaacccacgagaagctgatcccatgactaaagtgcaggccgaactagatgagaccaaaatcattctgcacaacaccatggagtctctgttagagcgaggtgagaagctagatgacttggtgtccaaatccgaggtgctgggaacacagtctaaagccttctataaaactgcccggaaacaaaactcatgctgtgccatcatgtgatgcagcctgccagaggcccaatgctggaatggcaccatcattcacatcagaactgcagcccctggaaaagaagagacagccatagacgaggagccagagtgggggcagactggccatttttattttgaagttcctgcgagaaatggatggtggaagggtggcgaatgttcaaattcatatgtgtggtagtgattcttggaaagaatttgaggtccccaaaggtgtatttttgggcaaatgaaaccataaactccgactggcttctgtagatgccaaagggctctttttcagctaaccctgggaaggctctgtgggagggaggtcggagccagctgtttctcgatctttggtatatctttggatcttatttgtacattaatgatattaacactccagtggggggtggggagtccctgatgctagggctggggtgggtggagtttgaagactcttgggaaagcctctcctggggccactgttgggggtgggagtgagcccaccacagaggccacaggcaggcccccacttcaggcccaaggcctggggcggggggaacagtcactgggtctcagattctgagactgttgtttagcttacctttctgctaggattggcttcccgcagagggcagggcccatcctaagcagcttccaagtcccacaaaggtggcttgtgggaggatttggaaggagctgcattgtgggcggggagtgtgtgggttgggttcgtaccagcaagtagactaggaactgagcccaggaaagggggatgttttcctggtgtttggatggtcagctgggagtgtccatcatcaggggaagatcaaacacaggtgcactcagctgcccagggcctctgggacacttgccttgacttgcaacttgccttgaacatcacgatcaaagcagcaggtgctgtggtctctcaaaattgatttttatttgactctgtggctctaagactgccttgaaccgcctgaggcctatgcatctgaacaagtgggtctctcccttgagcaccaggagtgggtgccagccggccccgaggattcccagcaccccacctatggtcttgccagcataggcttgctagttccttcttggtcagaggtagctgcagaggggggaggccaagggtttggtctaagctgtgccctgccacctggcaggaggcccactcactgcccaagtcatggcaacaggctggagcagcccaggagatgggcctaaaatgttctggatcccttgggtcctagtgttatgttccagtctgcccacctgtgctcaggatgcagccctgggatccagcacccatggaagcttctgctgggatggtgtcacctatgggttttgaaccagtgtggtatggtccttgggagctctgctctgagcttgccacactgctgagagcacccactgtcctgaccagagtctcagtggtcctgacccccaatgtgggcaggggctgggcaggagggtggggtctgctgtgggttcagaggactccacctcctggctggtttacctgctgctgcccattttctctgggtactgctggccagaggactttagcctacccctgaagagcctgtccatgtcattttcctactgccatagataccctaagcccagggccccttgaggcccagactcagcctgcccactggtgccggagacggagtggagtgggcctggatccgagggatgctacctctccctttcccacttgaggaccctggggagagatgggggcggggaaaatggaggtatgaatttggggtaagaggaagtgagatctccgcttgcaggtcagcccctgccttgcagggcgggctggcttgactcaggccctgtgagatagagggcccagcccagccccacccacagatcccctgctcctgttgtgttctgttgtaaatcatttggcgagactgtattttagtaactgctgcctaacttccctgtgttctatttgagaggcgcctgtctggataaagttgtcttgaaatttcaaaaaaaaaaaaaaaaaacgggagtctttgggagtccagtggctgcaaagggcatcccgggaacgtgatgccgcctgggcgcacggacagccctcccacatgacaaaggacatgttcccggggggccctatcctagggaccccacaaagaacggggccgccgccgcccaaaaaatataac

SEQ ID NO: 7926 - DNA, 986 bp, Homo sapiens
attacagcttccttatgtacgactgagtgggtcaaggtggtgcctaattatcctaatttgtatctttcagtgtttaagttagcaccgtagtgtttatatctactgtcaaatttccatcagggcccagctgcgattcgtgcgtatattgccctgtgcttaatgatgttgctcgtatgttccccgcctttccactgccgtactcgtgtctctattgttcagtcacttgagatgaaatgcttgcccagggtcttttcccctcaaacttaatgtttttactagttcatagtgtttggaacagtatatgccaatcactgagactgcatcagagtttgcaattttgtatgtttcattgccaaagaaggcttagtggttgttgactgtagtataagtcagctttctgtagcataagatttgattttcccatacttacttcacttgttatacatcactgattatttgggttaaactggactcatttcaagcagtttgcttttgttcaaatcgtgatgagaaacctaatactgtaatttgatttgagccataaaacacattttaatattagcttgtattatagttattaagcttgtttttgtggaaaaaaacttactaaaacctaggtaactctagattaggccagttcaggtgtattttgtatcttagtaatggatcatatcgtaaaaatagagataagttgggaagatatattgattatgctgttctgttgagggaaaggtcatgtatttagaaatttaaacttttggttattgtgttcacatcatagtattcaagcatcatttatagtttggttttgagaacttttctggtattacgtttatggcaaatgtataaaagaaacaagttttggttatatttttatatttgtaaagtaagtttggttaaagtgatcactgttctttttttattttattgtcatttcaataaaaaatatttgaaagagaaaaaaaaaaaaaaaaaaaaaaaaaaaa

SEQ ID NO: 7927 - DNA, 1017 bp, Homo sapiens
  misc_feature (903)..(903): n is a, c, g, or t
  misc_feature (905)..(905): n is a, c, g, or t
  misc_feature (908)..(908): n is a, c, g, or t
  misc_feature (922)..(922): n is a, c, g, or t
ccccagcaggcatgtgttagagggtgctctttcagtttagccttgtaggtggcttgtgttagtcagctgttagactccctgccttatcgaaaagcgcgcgcggggattgcgggagtcctggtttcttgccttgatgtactggagcaatcagatcacacggcggcttggagagtgagtgcaaggttttatgagtggaattagccctcagcagatgggggagccagaaggcagttggagtgggaagaacccagggaccatgggcgcctccaggctctataccctggtgctggtcctgcagcctcagcgagttctcctgggcatgaaaaagcgaggcttcggggccggccggtggaatggctttgggggcaaagtgcaagaaggagagaccatcgaggatggggctaggagggagctgcaggaggagagcggtctgacagtggacgccctgcacaaggtgggccagatcgtgtttgagttcgtgggcgagcctgagctcatggacgtgcatgtcttctgcacagacagcatccaggggacccccgtggagagcgacgaaatgcgcccatgctggttccagctggatcagatccccttcaaggacatgtggcccgacgacagctactggtttccactcctgcttcagaagaagaaattccacgggtacttcaagttccagggtcaggacaccatcctggactacacactccgcgaggtggacacggtctagcgggagcccagggcagcccctgggcaggagacgtggctgctgaacagctgcaaaccatcttcacctgggggcattgagtggcgcagagccgggtttcatctggaattaactggatggaagggaaaataaagctatctagcggtgaaaaaaaaaaaaaaaaaaaaaaaaaaaaaacncnccnccaccaatcccccntgcccaccacttcattcctcaccgtgcgcccctaaacatcacctctatccccagtccccccatcttgattaccttccttgcatccatcacaccgg

SEQ ID NO: 7928 - DNA, 1655 bp, Homo sapiens
  misc_feature (5)..(5): n is a, c, g, or t
  misc_feature (13)..(13): n is a, c, g, or t
  misc_feature (18)..(18): n is a, c, g, or t
  misc_feature (28)..(28): n is a, c, g, or t
  misc_feature (49)..(49): n is a, c, g, or t
  misc_feature (56)..(56): n is a, c, g, or t
  misc_feature (118)..(119): n is a, c, g, or t
  misc_feature (145)..(146): n is a, c, g, or t
aattncatgcgantgttnacagatcaancactcctgggtcacacactgngttcatngtcccatatcaggagttacatttgttgtagacaggactatatgttccaccccagacaaccanntcatccctggaaaactcatccagtgnnttcttcgttggtcaactaagacaggttaatccaacctacgtgactcccggggacagtggctgtgcttttaaaaagagatgcttgcaaagcaatggggaacgtgttctcggggcaggtttccgggagcagatgccaaaaagactttttcatagagaagaggctttcttttgtaaagacagaataaaaataattgttatgtttctgtttgttccctccccctcccccttgtgtgataccacatgtgtatagtatttaagtgaaactcaagccctcaaggcccaacttctctgtctatattgtaatatagaatttcgaagagacattttcactttttacacattgggcacaaagataagctttgattaaagtagtaagtaaaaggctacctaggaaatacttcagtgaattctaagaaggaaggaaggaaggaaggaaggaaagaagggagggaaacagggagaaagggaaaaagaagaaaaagagaaagatgaaaataggaacaaataaagacaaacaacattaagggccatattgtaagatttccatgttaatgatctaatataatcactcagtgcaacattgagaatttttttttaatggctcaaaaatggaaactgaaagcaagtcatggggaatgaatactttgggcagtatcttcctgatgtcttcttagctaagaggaggaaaaaaaggctgaaaaaatagggaggaaattccttcatcagaacgacttcaagtggataacaatatttataagaaatgaatggaaggaaatatgatcctcctgagactaactttgtatgttaaggtttgaactaagtgaatgtatctgcagaggaagtattataaagatatgtcattagatccaagtgctgattaaatttttatagtttatcagaaaagccttatattttagtttgttccacattttgaaagcaaaaaatatatatttgatatacccttcaattgccaaatttgatatgttgcactgaagacagaccctgtcatatatttaatggcttcaagcaggtacttctctgtgcattatagaatagattttaataatcttatagcattgtatattattattgctgttgtcactgttattattattgtggatactggcccttggtgtgttgcatagctccctatgtattctctgtttccatctttaagttcccagaccaatatacattaagagttttgcatggtctaaattgtgtttattccaaccacgtggaaagctcctggaaagaaattttacattcggttgttctgtgctcctaatgacacttgaccttgttgaacaaatggcagagcctttcccaaggatttgattgtttgtgaattatctgcatgtgtgcttttttttggtgtgtatttcattaaaaaatataaatatttatgaaaattgcacgcatattagagttaaccatgtactattgatacagcaacgctacattgcaaataaaagtccgatcccaaaaggagaatgagacaaaaaaaaaa

SEQ ID NO: 7929 - DNA, 3895 bp, Homo sapiens
  misc_feature (819)..(838): n is a, c, g, or t
ggaagagagaatagctacagattctccatcctcagtctgggcaaggcgacagctgtgccagccgggctctggcaggctcctggcagcatggcagtgaagcttgggaccctcctgctggcccttgccctgggcctggcccagccagcctctgcccgccggaagctgctggtgtttctgctggatggttttcgctcagactacatcagtgatgaggcgctggagtcattgcctggtttcaaagagattgtgagcaggggagtaaaagtggattacttgactccagacttccctagtctctcgtatcccaattattataccctaatgactggccgccattgtgaagtccatcagatgatcgggaactacatgtgggaccccaccaccaacaagtcctttgacattggcgtcaacaaagacagcctaatgcctctctggtggaatggatcagaacctctgtgggtcactctgaccaaggccaaaaggaaggtctacatgtactactggccaggctgtgaggttgagattctgggtgtcagacccacctactgcctagaatataaaaatgtcccaacggatatcaattttgccaatgcagtcagcgatgctcttgactccttcaagagtggccgggccgacctggcagccatataccatgagcgcattgacgtggaaggccaccactacgggcctgcatctccgcagaggaaagatgccctcaaggctgtagacactgtcctgaagtacatgaccaagtggatccaggagcggggcctgcaggaccgcctgaacgtcattattttctcggatcacggaatgacnnnnnnnnnnnnnnnnnnnnaagtgattgagctgaataagtacatcagcctgaatgacctgcagcaagtgaaggaccgcgggcctgttgtgagcctttggccggcccctgggaaacactctgagatatataacaaactgagcacagtggaacacatgactgtctacgagaaagaagccatcccaagcaggttctattacaagaaaggaaagtttgtctctcctttgactttagtggctgatgaaggctggttcataactgagaatcgagagatgcttccgttttggatgaacagcaccggcaggcgggaaggttggcagcgtggatggcacggctacgacaacgagctcatggacatgcggggcatcttcctggccttcggacctgatttcaaatccaacttcagagctgctcctatcaggtcggtggacgtctacaatgtcatgtgcaatgtggtgggcatcaccccgctgcccaacaacggatcctggtccagggtgatgtgcatgctgaagggccgcgccagcactgccccgcctgtctggcccagccactgtgccctggcactgattcttctcttcctgcttgcataactgatcatattgcttgtctcagaaaaaaacaccatcagcaaagtgggcctccaaagccagatgattttcattttatgtgtgaataatagcttcattaacacaatcaagaccatgcacattgtaaatacattattcttggataattctatacataaaagttcctacttgttaaaaaagatacaaaccttgtttttccagaaggtaggaaaatcctagctttccatttgtgcagttatatgtcattttctcctttcttttcacgttactcaggatgaactctctgagcagggacctgctcctgcagcaaccaaacttggagtggttattgcagacagacgtggctctgggcccctctctgtcccaccttgcacaaaggaccccctcagaccaggcccttgtctgtgccctgtccacacccaggagccatcctcagtgtctgtggccacaatcctgtactgttccttccatccctgataaaaggaggtctacatgaaagcaaaagctactgtctatttctgacccagctcatggaattttttcatcttatactgagctccagaaaggacgtaacttagcatggatcaccaatcaatcaaaaaataaataaatcactaaggattggagaactcatagaacaaggtgaaagacatgagtgccctcccaaagtctgagtgcacgaaaatttctctcttgccttgaggagcagaaaagcttctgatggacatgggcttctgtgagacttatcacacatagtgtatcgtggcatgaagcccggcacatagcaggccctgcatattgatggacaaatggatggcctgcctgccttccctgtccgttcacctgtgcaaaggcttcctcagacatgccactctgtggctcccaatatagggtgcagacaagagcaatccctgacatgacattatagcctgggaaagggctggctcactgatgagaatgtggaggcatcagcaaggatctcggtgggttgctcagagaggtgatgcactaagccttaatcctggacaccagtacccctgcagcatggcttgctcaacaacagtctttgagtggcatagaattccaaagaaaatggtgctgggtggagaatggagagagcatgatggagcagagtcccagtcactgaccaactaactggtcgtttgattaggaaacagtttggccaaagtaccacctttgagacctaagttcttttgatacctttgagaagagccactgagcctgagttgaaatatttttagcttagtcatctgtgtttgctataggagaaattgtaacacaagaaataactcctttttacatgatcatttatatctatatacatatatatacttgcatacactatcactgcattaaaaaatgagtttgggctgggcatggtggctcacacctataatcccaacactttcggaggccaaggagggacaaacgaacccttgaggccaggagttccagactaacttgggcaacacagggcgacccccatctctacaaaacataaaagatttttaaaaaattagccaggcatggtggcacatgcctgtggtctcagctacttgggaggctgaggcaggagaatcatttgagcccaggaggtcaaggctgcagtgagctttgatcacaccactgcactccagcctgggcaacagagcaagaccccatcctccacccccccaaaaaatagaaagaaaaaaaaagtttgcactaattgaggtacatctgcaagtgagactttttgtcaggaaaaggcaatatatcaggtctcctcaggacgatggaggccttatatggtgtgttaccttgaaaactgaatatcaacgttcaccttgattcaggaaagctgggtgctgtctccatgccatgaatcatgagagcaaaggatcactgcttaaaaatactgaatttaccttcacaaaagatttctaaagatttatgtaatgtgttttaaaagcgccagtaaaccatcggatcaattggaaagaaggcaactcttcagcctttgttatctagctgaaaacaaatgacaactttcaaaacattggcagtagttgttgaaaaagacgtctattgttcaaagtttctttctccttaaaggacggtgttccaatgaattcagtagagcccactttcctccactgtggaggaagaatccctaagagatactcaaatgattaaattaaaattggatcatcaaactcaagagaggcataaacttagacacagtcttgcatttttgtctttcctgaactcttctgccattttcctccttcactcgtcctgaaaatctgcaagttacataataaaactttagatatttgtctgacaaagtgtaattactcaactgaataaatgactgagaacaagttacaaaaggaatcatgaatcctggtaaacaataaagaagattcagacactgagggaaaaaaataaagctttttacttaaataatgcaaaaaaaaaaaaaaaa

SEQ ID NO: 7930 - DNA, 1223 bp, Homo sapiens
agaaggtcctgcgctgagagaagggggcggagacaggactacgcgcctggagtaggagaaggaggaaaaaagagaccatagacttccatcctggcctagagcggcccttaaagtgccagggagaggagggcgggtggggaccactccagaattggcgtccgcccacgcgtccggcgacccggaacccccctccccaagactatgaaagtgatgacgactcttatgaagtgttggatttaactgagtatgcaagaagacaccagtggtggaatcgagtgtttggccacagttcgggacctatggtagaaaaatactcagtagctacccagattgtaatgggtggcgttactggctggtgtgcaggatttctgttccagaaagttggaaaacttgcagcaactgcagtaggtggtggctttcttcttcttcagattgctagtcatagtggctatgtgcagattgactggaagagagttgaaaaagatgtaaataaagcaaaaagacagattaagaaacgagcgaacaaagcagcacctgaaatcaacaatttaattgaagaagcaacagaatttatcaagcagaacattgtgatatccagtggatttgtgggaggctttttgctcggacttgcatcttaaggacatgaatattctcccataacggattcaactatgagaagagaagtggcagcaataaggcagtctctcaaaagtcatactgccagagtctctagggcaaggagaaacaactagctggacaatactcaattcacaacttagcattttgccatctgaagcttggcaaactagtatctgctgtaaaacaacctatatggtatgtgaaccgtagtattcctgagcaaaacgtggctttcatcgctttgtaaaaatttgcatctgtttagaaactagcctataaaatatcaccattggatgtagatatggagagaaaagaaatatgttgggtttattgcttagcgaaatattctctttttatttaaataaaatgttcttcattgtgttttatggtatgtgtccataatttaaaattcatgttatagtttcagtattaaggctgactttttttttttaagatatgtttgcaataagttaaaaaactgtaatacccttttgtggaaagctttagaaatgatataattattaaagatattaaacagactctgctgatgtaaaaaaaaaaaaaacaatcaaccaccacaaaag

SEQ ID NO: 7931 - DNA, 1521 bp, Homo sapiens
agcggggcggcggaggatggcgcgcgcggggcccgcacgtggaggccggcgcgggggcgcgggcagggccggctgctgagacgcgctgctgccccccgcgcgggcgccgcggcttcaatggcgccatcgcccaggaccggcagccggcaagatgcgaccgccctgcccagcatgtcctcaactttctgggcgttcatgatcctggccagcctgctcatcgcctactgcagtcagctggccgccggcacctgtgagattgtgaccttggaccgggacagcagccagcctcggaggacgatcgcccggcagaccgcccgctgtgcgtgtagaaaggggcagatcgccggcaccacgagagcccggcccgcctgtgtggacgcaagaatcatcaagaccaagcagtggtgtgacatgcttccgtgtctggagggggaaggctgcgacttgttaatcaaccggtcaggctggacgtgcacgcagcccggcgggaggataaagaccaccacggtctcctgacaaacacagcccctgaggggccccgggagtggccttggctccctggagagcccacgtctcagccacagttctccactcgcctcggacttcacccgttctctgccgcccgcccactccgtttccctgtggtccgtgaaggacggcctcaggccttggcatcctgagcttcggtctgtccagccgacccgaggaggccggactcagacacataggcggggggcggcacctggcatcagcaatacgcagtctgtgggagcccggccgcgcccagcccccgccgaccgtggcgttggccctgctgtcctcagaggaggaggaggaggaggcagctccggcagccacagaaggctgcagcccagcccgcctgagacacgacgcctgccccaggggactgtcaggcacagaagcggcctcctcccgtgccccagactgtccgaattgcttttattttcttatactttcagtatactccatagaccaaagagcaaaatctatctgaacctggacgcaccctcactgtcagggtccctggggtcgcttgtgcgggcgggagggcaatggtggcagagacatgctggtggccccggcggagcggagagggcggccgtggtggaggcctccaccccaggagcaccccgcgcaccctcggaggacgggcttcggctgcgcggaggccgtggcacacctgcgggaggcagcgacggcccccacgcagacgctgggaacgcaggccgctttattcctctgtacttagatcaacttgaccgtactaaaatccctttctgttttaaccagttaaacatgcctcttctacagctccatttttgatagttggataatccagtatctgccaagagcatgttgggtctcccgtgactgctgcctcatcgataccccatttagctccagaaagcaaagaaaactcgagtaacacttgtttgaaagagatcattaaatgtattttgcaaagcctaaaaaaaaaaaaaaaaaaaataaaaaaaaaaa

SEQ ID NO: 7932 - DNA, 2744 bp, Homo sapiens
  misc_feature (2534)..(2743): n is a, c, g, or t
taggctagtacgaggcctggtggtgtattcggcacgaggggaagccctggggcgctgccgccgctttccttaaccacaaatcaggccggacaggagagggaggggtgggggacagtgggtgggcattcagactgccagcactttgctatctacagccggggctcccgagcggcagaaagttccggccactctctgccgcttgggttgggcgaagccaggaccgtgccgcgccaccgccaggatatggagctactgtcgccaccgctccgcgacgtagacctgacggcccccgacggctctctctgctcctttgccacaacggacgacttctatgacgacccgtgtttcgactccccggacctgcgcttcttcgaagacctggacccgcgcctgatgcacgtgggcgcgctcctgaaacccgaagagcactcgcacttccccgcggcggtgcacccggccccgggcgcacgtgaggacgagcatgtgcgcgcgcccagcgggcaccaccaggcgggccgctgcctactgtgggcctgcaaggcgtgcaagcgcaagaccaccaacgccgaccgccgcaaggccgccaccatgcgcgagcggcgccgcctgagcaaagtaaatgaggcctttgagacactcaagcgctgcacgtcgagcaatccaaaccagcggttgcccaaggtggagatcctgcgcaacgccatccgctatatcgagggcctgcaggctctgctgcgcgaccaggacgccgcgccccctggcgccgcagccgccttctatgcgccgggcccgctgcccccgggccgcggcggcgagcactacagcggcgactccgacgcgtccagcccgcgctccaactgctccgacggcatgatggactacagcggccccccgagcggcgcccggcggcggaactgctacgaaggcgcctactacaacgaggcgcccagcgaacccaggcccgggaagagtgcggcggtgtcgagcctagactgcctgtccagcatcgtggagcgcatctccaccgagagccctgcggcgcccgccctcctgctggcggacgtgccttctgagtcgcctccgcgcaggcaagaggctgccgcccccagcgagggagagagcagcggcgaccccacccagtcaccggacgccgccccgcagtgccctgcgggtgcgaaccccaacccgatataccaggtgctctgaggggatggtggccgcccaaccgcgcgagggatggtgcccctagggtccctcgcgcccaaaagattgaacttaaatgcccccctcccaacagcgctttaaaagcgacatctcttgaggtaggagaggcgggagaactgaagtttccgcccccgcccgacagggcaaggacacagcgcggttttttccacgcagcacccttctcggagacccattgcgatggccgctccgtgttcctcggtgggccagagctgaaccttgaggggctaggttcaggtttctcgcgccctcccccatgggggtgagaccctcgcagacctaagccctgccccgggatgcaccggttatttgggggggcgtgagacccagtgcactccggtcccaaatgtagcaggtgtaaccgtaacccacccccaacccgtttcccggttcaggaccactttttgtaatactttttgtaatctattcctgtaaataagagttgctttgccagagcaggagcccctggggctgtatttatctctgaggcatggtgtgtggtgctacagggaatttgtacgtttataccgcaggcgggcgagccgcgggcgctcgctcaggtgatcaaaataaaggcgctaatttataacgcaaaaaaaaaaaaaaaaaaaactcgaggccattttctcttaaacaaaacaaaactttctaagtacagtcattctctaggatttgggaagctccttgcacttggaacagggctcaggtgggtggagcagtaaggcactacccagagagcttgctgctgcggccctgtcctgcggcctcaaagttcttctttactatatataacgtgcggtcatacctttcttcgttgtggtggggatggaagagcagagggagcatggcccaggggtgttgaggccagcggtgagagccgtgttagccaagacatggaactgtgttctcaagggttatgtggggcgtgggctctccatagtgtgtatgaaaagcttgttgactctagcggctcagagaggactttgctgggtttctttctgtgaatatctccgtgctgaccatgctggaattggatgattctgcaattcgggacctactgcaggggtccgtttagtaacgtcttgtctgtgatctttgttcttgacctctagaccccaagatgtgaacagtgcacgtgttaatgtcatctttgctcatgtgttataagccccaagttgctgtatattttcacaagtatgtctacacactggtcatgattttgataataaataacgataaatcgaaaaaaaaaaaaaaaaaaaaaaaaaaaaaaaaaaaaaaaaaaaaaaaannnnnnnnnnnnnnnnnnnnnnnnnnnnnnnnnnnnnnnnnnnnnnnnnnnnnnnnnnnnnnnnnnnnnnnnnnnnnnnnnnnnnnnnnnnnnnnnnnnnnnnnnnnnnnnnnnnnnnnnnnnnnnnnnnnnnnnnnnnnnnnnnnnnnnnnnnnnnnnnnnnnnnnnnnnnnnnnnnnnnnnnnnnnnnnnnnnnnnnnnnnnnnnnnng

SEQ ID NO: 7933 - DNA, 3509 bp, Homo sapiens
ggcacgagggcccgagaagctggggagcatggaccagaccccgcagcgctggcaccatgacgctcgcccgcttcgtgctagccctgatgttaggggcgctccccgaagtggtcggctttgattctgtcctcaatgattccctccaccacagccaccgccattcgccccctgcgggtccgcactacccctattaccttcccacccagcagcggcccccgacgacgcgtccgccgccgcctctcccgcgcttcccgcgccccccgcgggcgctccctgcccagcgcccgcacgccctccaggccgggcacacgccccggccgcacccctggggctgccccgccggcgagccatgggtcagcgtgacggacttcggcgccccgtgtctgcggtgggcggaggtgccacccttcctggagcggtcgcccccagcgagctgggctcagctgcgaggacagcgccacaacttttgtcggagccccgacggcgcgggcagaccctggtgtttctacggagacgcccgtggcaaggtggactggggctactgcgactgcagacacggatcagtacgacttcgtggcggcaaaaatgagtttgaaggcacagtggaagtatatgcaagtggagtttggggcactgtctgtagcagccactgggatgattctgatgcatcagtcatttgtcaccagctgcagctgggaggaaaaggaatagcaaaacaaaccccgttttctggactgggccttattcccatttattggagcaatgtccgttgccgaggagatgaagaaaatatactgctttgtgaaaaagacatctggcagggtggggtgtgtcctcagaagatggcagctgctgtcacgtgtagcttttcccatggcccaacgttccccatcattcgccttgctggaggcagcagtgtgcatgaaggccgggtggagctctaccatgctggccagtggggaaccgtttgtgatgaccaatgggatgatgccgatgcagaagtgatctgcaggcagctgggcctcagtggcattgccaaagcatggcatcaggcatattttggggaagggtctggcccagttatgttggatgaagtacgctgcactgggaatgagctttcaattgagcagtgtccaaagagctcctggggagagcataactgtggccataaagaagatgctggagtgtcctgtacccctctaacagatggggtcatcagacttgcaggtgggaaaggcagccatgagggtcgcttggaggtatattacagaggccagtggggaactgtctgtgatgatggctggactgagctgaatacatacgtggtttgtcgacagttgggatttaaatatggtaaacaagcatctgccaaccattttgaagaaagcacagggcccatatggttggatgacgtcagctgctcaggaaaggaaaccagatttcttcagtgttccaggcgacagtggggaaggcatgactgcagccaccgcgaagatgttagcattgcctgctaccctggcggcgagggacacaggctctctctgggttttcctgtcagactgatggatggagaaaataagaaagaaggacgagtggaggtttttatcaatggccagtggggaacaatctgtgatgatggatggactgataaggatgcagctgtgatctgtcgtcagcttggctacaagggtcctgccagagcaagaaccatggcttactttggagaaggaaaaggacccatccatgtggataatgtgaagtgcacaggaaatgagaggtccttggctgactgtatcaagcaagatattggaagacacaactgccgccacagtgaagatgcaggagttatttgtgattattttggcaagaaggcctcaggtaacagtaataaagagtccctctcatctgtttgtggcttgagattactgcaccgtcggcagaagcggatacatggtgggaaaaattctttaaggggtggttggccttggcaggtttccctccggctgaagtcatcccatggagatggcaggctcctctgcggggctacgctcctgagtagctgctgggtcctcacagcagcacactgtttcaagaggtatggcaacagcactaggagctatgctgttagggttggagattatcatactctggtaccagaggagtttgaggaagaaattggagttcaacagattgtgattcatcgggagtatcgacccgaccgcagtgattatgacatagccctggttagattacaaggaccagaagagcaatgtgccagattcagcagccatgttttgccagcctgtttaccactctggagagagaggccacagaaaacagcatccaactgttacataacaggatggggtgacacaggacgagcctattcaagaacactacaacaagcagccattcccttacttcctaaaaggttttgtgaagaacgttataagggtcggtttacagggagaatgctttgtgctggaaacctccatgaacacaaacgcgtggacagctgccagggagacagcgaaggaccactcatgtgtgaacggcccggagagagctgggtggtgtatggggtgacctcctgggggtatggctgtggagtcaaggattctcctggtgtttataccaaagtctcagcctttgtaccttggataaaaagtgtcaccaaactgtaattcttcatggaaacttcaaagcagcatttaaacaaatggaaaactttgaacccccactattagcactcagcagagatgacaacaaatggcaagatctgtttttgctttgtgttgtggtaaaaaattgtgtaccccctgctgcttttgagaaatttgtgaacattttcagaggcctcagtgtagtggaagtgataatccttaaatgaacattttctaccctaatttcactggagtgacttattctaagcctcatctatcccctacctatttctcaaaatcattctatgctgattttacaaaagatcatttttacatttgaactgagaaccccttttaattgaatcagtggtgtctgaaatcatattaaatacccacatttgacataaatgcggtaccctttactacactcatgagtggcatatttatgcttaggtcttttcaaaagacttgacaagaaatcttcatattctctgtagcctttgtcaagtgaggaaatcagtggttaaagaattccactataaacttttaggcctgaataggagtagtaaagcctcaaggacatctgcctgtcacaatatattctcaaagtgatctgatatttggaaacaagtatccttgttgagtaccaagtgctacagaaaccataagataaaaatactttctacctacagcgtgctaaactaggcaaatttggaaagggtttctgggtaactaaatgccagctgggacatacaacctattttatccaacacatttaacatatctactatatttgcttttaacaggcacctcttcatggtccaggttcccgacctggtgtagggg

SEQ ID NO: 7934 - DNA, 3020 bp, Homo sapiens
gccctggctctggaggagaatgccacctcccagaaggtgctggatatctttgaacagcggctggagcaggttgagagtggcctccatcgggccctgcggctacagcgcttcttccagcaggcacatgaatgggtggatgagggctttgctcggctggcaggagctgggccgggtcgggaggctgtgctggctgcactggccctgcggcgggccccagagcccagtgccggcaccttccaggagatgcgggccctggccctggacctgggcagcccagcagccctgcgagaatggggccgctgccaggcccgctgccaagagctagagaggaggatccagcaacacctgggagaggaggcgagcccacggggctaccgacgacggcgggcagacggtgccagcagtggaggggcccagtgggggccccgcagcccctcgcccagcctcagctccttgctgctccccagcagccctgggccacggccagccccatcccattgctccctggccccatgtggagaggactatgaggaagagggccctgagctggctccagaagcagagggcaggcccccaagagctgtgctgatccgaggcctggaggtcaccagcactgaggtggtagacaggacgtgctcaccacgggaacacgtgctgctgggccgggctagggggccagacggaccctggggagtaggcaccccccggatggagcgcaagcgaagcatcagtgcccagcagcggctggtgtctgagctgattgcctgtgaacaagattacgtggccaccttgagtgagccagtgccaccccctgggcctgagctgacgcctgaacttcggggcacctgggctgctgccctgagtgcccgggaaaggcttcgcagcttccaccggacacactttctgcgggagcttcagggctgcgccacccaccccctacgcattggggcctgcttccttcgccacggggaccagttcagcctttatgcacagtacgtgaagcaccgacacaaactggagaatggtctggctgcactcagtccctcaagcaagggctccatggaggctggcccttacctgccccgagccctgcagcagcctctggaacagctgactcggtatgggcggctcctggaggagctcctgagggaagctgggcctgagctcagttctgagtgccgggcccttggggctgctgtacagctgctccgggaacaagaggcccgtggcagagacctgctggccgtggaggcggtgcgtggctgtgagatagatctgaaggagcagggacagctcttgcatcgagaccccttcactgtcatctgtggccgaaagaagtgccttcgccatgtctttctcttcgagcatctcctcctgttcagcaagctcaagggccctgaaggggggtcagagatgtttgtttacaagcaggcctttaagactgctgatatggggctgacagaaaacatcggggacagcggactctgctttgagttgtggtttcggcggcggcgtgcacgagaggcatacactctgcaggcaacctcaccagagatcaaactcaagtggacaagttctattgcccagctgctgtggagacaggcagcccacaacaaggagctccgagtgcagcagatggtgtccatgggcattgggaataaacccttcctggacatcaaagcccttggggagcggacgctgagtgccctgctcactggaagaggtgagggccagggtgctggggggtggcccccaggagtgaagaccttgacaatgaggatacaaaggggaggtatggtggaaagtcaggaaaggcatctcgtccccaaatcagtgggactggctgggaggccctctgtgagactgagggtcattccagggagccaagagggctttcccacaccagcaccccaccccccactccccactctctgcagccgcccgcacccgggcctccgtggccgtgtcatcctttgagcatgccggcccctcccttcccggcctttcgccgggagcctgctccctgcctgcccgcgtcgaggaggaggcctgggatctggacgtcaagcaaatttccctggccccagaaacacttgactcttctggagatgtgtccccaggaccaagaaacagccccagcctgcaacccccccaccctgggagcagcactcccaccctggccagtcgagggatcttagggctatcccgacagagtcatgctcgagccctgagtgaccccaccacgcctctgtgacctgggtgagtcagcatccccaatttctaccacatccagcactcctaccatcttgcatgtaccttccttcctgtccccggctacttgggagtcagcttcttccctctcccaactcatctccctcttctctcctggcttctagagaagatccagaacttgcgtgcagcttctcctctcagcacactttgggctgggatggcagtggggcataatggagccctgggcgatcgctgaatttcttccctctgcttcctggacacagaggaggtctaacgaccagagtattgccctgccaccactatctctagtctccctagcttggtgccttctcctgcaggagtcagagcagccacattgcttgccttcataccctggaggtggggaagttatccctcttccggtgctttcccatcctgggccactgtatccaggacatcactcccatgccagccctccctggcagcccatgttctcctcttttctcaccccctgactttccctgagaagaatcatctctgccaggtcaactggagtccctggtgactccattctgaggtgtcacaagcaatgaagctatgcaaacaataggagggtgtgacaggggaaccgtagactttatatatgtaattactgttattataatactattgttatattaaatgtatttactcccaaaaaaaaaaaaaaaaaaaaaaaaaaaaaaaaaaaaaaaaaatgataaataacttgaggcactttccctcaaccagcccttaactaggaacac

SEQ ID NO: 7935 - DNA, 4244 bp, Homo sapiens
  misc_feature (201)..(239): n is a, c, g, or t
  misc_feature (1334)..(1351): n is a, c, g, or t
  misc_feature (1393)..(1412): n is a, c, g, or t
ccacgcgtccgccggatcagagagtgctccgagctgggttgccccactgtgcttgtatctgcactctccaacactaggcatcattgacatgttaaagcttagccaaatagaattgttctttgtcattctttttttaacttttacttattcattaggatgatttcataatatatttcctggtttagaggaaacaggaacaannnnnnnnnnnnnnnnnnnnnnnnnnnnnnnnnnnnnnnaaagaaaaaagttgcttgaaatccttcaacatgatcctgattctatcttagacacgttaacttctcggaggctgatttctgaggaagagtatgagactctggagaatgttacagatctcctgaagaaaagtcggaagctgttaattttggtacagaaaaagggagaggcgacctgtcagcattttctcaagtgtttatttagtacttttccacagttagctgccatttgcggcttaaggcatgaagttttaaaacatgagaatacagtacctcctcaatctatgggggcaagcagtaattcagaagatgctttttctcctggaataaaacagcctgaagcccctgagatcacagtgttcttcagtgagaaggaacacttggatttggaaacctctgagtttttcagggacaagaaaactagttatagggaaacagctttgtctgccaggaagaatgagaaggaatatgacacaccagaagtcacattatcatattcagttgagaaagttggatgtgaagttccagcaactattacatatataaaagatggacagagatatgaggagctagatgattctttatacttaggaaaagaggaatatctaggatctgttgacacccctgaagatgcagaagccactgtggaagaggaggtttatgatgacccagagcacgttggatatgatggtgaagaggacttcgagaattcagaaaccacagagttctctggtgaagaaccaagttatgagggatcagaaaccagcctttcattggaggaggaacaggagaaaagtatagaagaaagaaaaaaggtgtttaaagatgtcctgttatgtttgaacatggatagaagcagaaaggttctgccagattttgttaaacaattctccttagatcgaggatgtaagtggacccctgagagtccaggagacttagcctggaatttcctgatgaaagttcaagcacgagatgtgacggctagggattcaatcctcagtcacaaggttctggatgaagatagcaaggaggatttgctggctggagtggagaatttggaaattcgagacatacaaaccattaatccccttgacgtgnnnnnnnnnnnnnnnnnntgttcagatagctctttgcaacgccaagtcatgtcaaacatnnnnnnnnnnnnnnnnnnnnttcccctgctactgccagatgcagaaaacaacaaaagcatcttaatgctgggggccatgaaagacattgtgaagaagcagtcaacacagttttcaggggggcctacagaggatacagaaaagtttctgactctcatgaagatgcctgtcatctcttttgtgcgtctaggatactgtagcttctctaagtccagaatcctcaacacacttctcagccctgcccagttgaaattacacaaaatctttcttcatcaagatttgcctcttttggtgcttccccggcaaatctctgatggcctggttgagataacatggtgttttcctgatagcgatgatagaaaggaaaacccctttttccaaaagcctgttgctctggctaatctccgtggaaatctagaaagtttttggactcagtttggttttttgatggaagtttcttcagctgtgttttttttcactgactgtttaggtgagaaggaatgggacttgctaatgtttttaggagaggctgccattgaaagatgctactttgttctcagttcccaagccagggagagtgaagaggctcaaatttttcagaggatactgaacttgaagccagcacagctactgttttgggagaggggagatgctggggatagaaggaagaacatggagggccttcaagctgccctccaggaagtgatgttctcttcttgcctcagatgtgtgtctgtggaggatatggccgccctggccagggagctggggattcaggtagatgaagactttgaaaacactcagagaattcaagtttcctctggagaaaacatggctgggacagctgaaggtgagggtcagcaaagacacagtcagctaaaaagctcatctaaaagccaggctctaatgccaattcaagagcctgggactcaatgtgagctcagccagaatcttcagaatctctatggtaccccagtattcaggcctgttctagagaactcctggctctttccaaccagaattggaggtaactttaaccatgtttccttgaaagcctcctgggttatgggccgcccctttgggtcagagcagaggcctaagtggttccatcctttgccttttcagaatgcaggggcccagggccgaggtaaaagttttggtattcaatccttccatccccagatattttattcaggtgaaagattcatgaaattttccagagttgctcggggatgtcactcgaatggaacatttgggagactgccaagacccatttgtcagcatgtacaggcctgccctgagagaccacaaatgatgggaactcttgaaaggtctagggcagtagcctccaagataggtcactcctattccctggattcacagccagcaagagcagtagggaagccatggcctcagcaagcttgcaccagggtaacagagttaactgaagcaactggaaaactgataagaacatcccatattggaaagcctcaccctcagtcctttcaaccagcagcagccacacaaaaactaagacctgcttctcagcaaggagtccagatgaagacacaaggtggggcttcaaatccagctctccaaatagggtcccatcccatgtgcaagagctctcagttcaaatccgatcagtccaacccatccacagtcaaacactcccagcctaaacccttccattctgtgccctctcaacctaaatcctctcagacaaaatcctgtcagtcccagccctcccaaactaaaccttctccatgcaaatctactcagcctaagccaagccagccctggcctccccagtctaagccttctcagcccagaccccctcaacctaagtcatcctcaaccaatccttcacaagctaaggcacaccactcaaaagcagggcagaagaggggagggaagcattaaagagctaactccagagatctataaagcatatcctttacccaggccattcctatcatatagtaagcagaagagttgccatgaaagtaaaagactactgtcattagcatgtaaaacaaagaaagatatacatgaccgaattggatatctttgtttgtttgtttgagacagagtttcactcttgttgcccaggctggagtgcaatggcacgatctcggctcaccgcaacctctgcttcctggcttaaagtgattctcctgcctcagcctctcgagtagctgggattacaggcatgcaccaccacacccagctaattttgtatttttagtagaggcagggtttctccatgttggtcaggctggtcttgaactcccgacctcaggtgatccgcccacctaggcctctcaaagtgttgggattacgtgtgtaagccacagtgcccagcccgaattggatatctttaagatatctgtaagtgttatatccctaaccaagaagaaaaatatgaaaataattaagactagaatcaagcagtagataattgaatccaatcttgggtattattagataatgtataacttgcacccagggaatgggggtctatgagacaaccccacttggagaagaatggggttagggtctctaattgcaaagtgactgtacaataggacgaaagttgcctctgtgtctgagaaagtatcttagttgttggctgctccagaggtatctttgtcaaaagcttctggttcaatatcagccactgagcagataaccctgcttatttggtgtggttaaatcaactagcttctgctaatagccccaatttgcttgaatgggaaaactctctcatttgacccttataggtagaaataatgaattaacaaccaataaaattaatcatttggcattaaaaaaaaaaaaaaaaaaaaaaaaa

SEQ ID NO: 7936 - DNA, 4449 bp, Homo sapiens
aaagatggcggcagcggcggcggtgggcaacgcggtgccctgcggggcccggccttgcggggtccggcctgacgggcagcccaagcccgggccgcagccgcgcgcgctccttgccgccgggccggcgctcatagcgaacggtgacgagctggtggctgccgtgtggccgtaccggcggttggcgctgttgcggcgcctcacggtgctgccattcgccgggctgctttacccggcctggttgggtgccgcagccgctggctgctggggctggggcagcagttgggtgcagatccccgaagctgcgctgctcgtgcttgccaccatctgcctcgcgcacgcgctcactgtcctctcggggcattggtatgtgggaggagctttgcagcgatcagcctggagaccggagtacgaccccagcaaagcgacctttgtgaaggtggtgccaacccccaacaatggctccacggagctcgtggccctgcaccgcaatgagggcgaagacgggcttgaggtgctgtccttcgaattccagaagatcaagtattcctacgatgccctggagaagaagcagtttctccccgtggcctttcctgtgggaaacgccttctcatactatcagagcaacagaggcttccaggaagactcagagatccgagcagctgagaagaaatttgggagcaacaaggccgagatggtggtgcctgacttctcggagcttttcaaggagagagccacagcccccttctttgtatttcaggtgttctgtgtggggctctggtgcctggatgagtactggtactacagcgtctttacgctatccatgctggtggcgttcgaggcctcgctggtgcagcagcagatgcggaacatgtcggagatccggaagatgggcaacaagccccacatgatccaggtctaccgaagccgcaagtggaggcccattgccagtgatgagatcgtaccaggggacatcgtctccatcggccgctccccacaggagaacctggtgccatgtgacgtgcttctgctgcgaggccgctgcatcgtagacgaggccatgctcacgggggagtccgtgccacagatgaaggagcccatcgaagacctcagcccagaccgggtgctggacctccaggctgattcccggctgcacgtcatcttcgggggcaccaaggtggtgcagcacatccccccacagaaagccaccacgggcctgaagccggttgacagcgggtgcgtggcctacgtcctgcggaccggattcaacacatcccagggcaagctgctgcgcaccatcctcttcggggtcaagagggtgactgcgaacaacctggagaccttcatcttcatcctcttcctcctggtgtttgccatcgctgcagctgcctatgtatggattgaaggtaccaaggaccccagccggaaccgctacaagctgtttctggagtgcaccctgatcctcacctcggtcgtgcctcctgagctgcccatcgagctgtccctggccgtcaacacctccctcatcgccctggccaagctctacatgtactgcacagagcccttccggatcccctttgctggcaaggtcgaggtgtgctgctttgacaagacggggacgttgaccagtgacagcctggtggtgcgcggtgtggccgggctgagagacgggaaggaggtgaccccagtgtccagcatccctgtagaaacacaccgggccctggcctcgtgccactcgctcatgcagctggacgacggcaccctcgtgggtgaccctctagagaaggccatgctgacggccgtggactggacgctgaccaaagatgagaaagtattcccccgaagtattaaaactcaggggctgaaaattcaccagcgctttcattttgccagtgccctgaagcgaatgtccgtgcttgcctcgtatgagaagctgggctccaccgacctctgctacatcgcggccgtgaagggggcccccgaaactctgcactccatgttctcccagtgcccgcccgactaccaccacatccacaccgagatctcccgggaaggagcccgcgtcctggcgctggggtacaaggagctgggacacctcactcaccagcaggcccgggaggtcaagcgggaggccctggagtgcagcctcaagttcgtcggcttcattgtggtctcctgcccgctcaaggctgactccaaggccgtgatccgggagatccagaatgcgtcccaccgggtggtcatgatcacgggagacaacccgctcactgcatgccacgtggcccaggagctgcacttcattgaaaaggcccacacgctgatcctgcagcctccctccgagaaaggccggcagtgcgagtggcgctccattgacggcagcatcgtgctgcccctggcccggggctccccaaaggcactggccctggagtacgcactgtgcctcacaggcgacggcttggcccacctgcaggccaccgacccccagcagctgctccgcctcatcccccatgtgcaggtgttcgcccgtgtggctcccaagcagaaggagtttgtcatcaccagcctgaaggagctgggctacgtgaccctcatgtgtggggatggcaccaacgacgtgggcgccctgaagcatgctgacgtgggtgtggcgctcttggccaatgcccctgagcgggttgtcgagcggcgacggcggccccgggacagcccaaccctgagcaacagtggcatcagagccacctccaggacagccaagcagcggtcggggctccctccctccgaggagcagccaacctcccagagggaccgcctgagccaggtgctgcgagacctcgaggacgagagtacgcccattgtgaaactgggggatgccagcatcgcagcacccttcacctccaagctctcatccatccagtgcatctgccacgtgatcaagcagggccgctgcacgctggtgaccacgctacagatgttcaagatcctggcgctcaatgccctcatcctggcctacagccagagcgtcctctacctggagggagtcaagttcagtgacttccaggccaccctacaggggctgctgctggccggctgcttcctcttcatctcccgttccaagcccctcaagaccctctcccgagaacggcccctgcccaacatcttcaacctgtacaccatcctcaccgtcatgctccagttctttgtgcacttcctgagccttgtctacctgtaccgtgaggcccaggcccggagccccgagaagcaggagcagttcgtggacttgtacaaggagtttgagccaagcctggtcaacagcaccgtctacatcatggccatggccatgcagatggccaccttcgccatcaattacaaaggcccgcccttcatggagagcctgcccgagaacaagcccctggtgtggagtctggcagtttcactcctggccatcattggcctgctcctcggctcctcgcccgacttcaacagccagtttggcctcgtggacatccctgtggagttcaagctggtcattgcccaggtcctgctcctggacttctgcctggcgctcctggccgaccgcgtcctgcagttcttcctggggaccccgaagctgaaagtgccttcctgagatggcagtgctggtacccactgcccaccctggctgccgctgggcgggaaccccaacagggccccgggagggaaccctgcccccaaccccccacagcaaggctgtacagtctcgcccttggaagactgagctgggacccccacagccatccgctggcttggccagcagaaccagccccaagccagcacctttggtaaataaagcagcatctgagattttaaaaaaaaaaaaaaaaaaaaaaaaaaaaaaaaaaaaaaaaaaaaaaaaaacaaaaatatagcaaccaccatacgaacataaccaaaggggggggggcgcgctaaataataaatatcctcccctgggagggggcgccagaagcatatattactcgagacaacccccagccatgtttgtattcaacaagaggggcgcgctcccataattttaaggagcggcggattaataaaagaagcagacgacgagcagcgcgccatattaacaaacaacagctggtgtctgatgagagaaaaaccgtggccatcacggggaactacgtttttggtgagaagaaacccaccacccaacttatttggtgggggggcgacacgaacaacacattggggggcagacccaacgctctgccagacaaaagagttattaccctccctcggccggaggcattataacaacctgttgatggatggtatataatggtgtgtaaagcacccacgaccatgcaatatatgcgtccgctccagagcaaaaaagtttggaacgcacgaggcgttagtataacacagacgaattatatatcacagggcgggtatagtagaaaatagagggtg

SEQ ID NO: 7937 - DNA, 1032 bp, Homo sapiens
  misc_feature (583)..(604): n is a, c, g, or t
ctttttttttttttttttttttttttttttttttttttttttttttttttttttttttttttttttggctgggaggagctgtttaatcgttcagggaggctgatagctgctgggactcactgggctcatgcgggaagggatggggtcacaattcatatttacagtgaccaaagggcattttcctaaagtacccacaaatagaagtatatatatatatttatatatatatttatatatatatatagagtacttcattaaatgttctgttgaaggaatgcagaaacttccagtctcctccccagcagctctgttccatccaatcacagaacccttagagcgcaacagcccggagccgtggccttgcctgtggctggaggagttggcaaagcgtggggcccgcggatgccagcacaggctcatcgacctcccccagacggcgcctttgtcccctcctctctcccctggactcctgtctcggatgaccacgcctcccagagcacaggccccacttcccctctctcctgaaacgccaggccaggcagagggtcctgcaatcctgctacctgcagtcggtctgccaggnnnnnnnnnnnnnnnnnnnnnntgtcctggggaagggaggcagagggagggagggaggcttcctgaagcagggtgctcccacaggggcagcgggtccgaagggtgcctgggctcggtctccatgggctggtcggcttccctgaagggcagtgccatggggttcccaaggtggtgtggaggcccatgcagctcccactgtggagggcaggtgcaccctccgcggaccaggccacccccaggcagggccgctccccccggttatttgtagggccgcaggaaccgagacactttggagcgcagcagtttgatgaaggaccgtgggaacatctccttggattcctgggctgtgtacttgaagtagttctggggatgcgccagcacgtcgaagagggccttgatcagcttcttgtctttcaaaatttcctggtggttctccgaggcgtacaggcg

SEQ ID NO: 7938 - DNA, 4081 bp, Homo sapiens
gtcaaattcaattaaaaggaatcctaatgcaccggttgtcagacgaggttggctttataaacaggacagtactggcatgaaattgtggaagaaacgctggtttgtgctttctgacctttgcctcttttattatagagatgagaaagaagagggtatcctgggaagcatactgttacctagttttcagatagctttgcttacctctgaagatcacattaatcgcaaatatgcttttaaggcagcccatccaaacatgcggacctattatttctgcactgatacaggaaaggaaatggagttgtggatgaaagccatgttagatgctgccctagtacagacagaacctgtgaaaagagtggacaagattacatctgaaaatgcaccaactaaagaaaccaataacattcccaaccatagagtgctaattaaaccagagatccaaaacaatcaaaaaaacaaggaaatgagcaaaattgaagaaaaaaaggcattagaagctgaaaaatatggatttcagaaggatggtcaagatagacccttaacaaaaattaatagtgtaaagctgaattctctgccatctgaatatgagagtgggtcagcatgccctgctcagactgtgcactacagaccaatcaacttgagcagttcagagaacaaaatagtcaatgttagcctggcagatcttagaggtggaaatcgccccaatacagggcccttatacacagaggccgatcgagtcatacagagaacaaattcaatgcagcagttggaacagtggattaaaatccagaaggggaggggtcatgaagaagaaaccaggggagtaatttcttaccaaacattaccaagaaatatgccaagtcacagagcccagattatggcccgctaccctgaaggttatagaacactcccaagaaacagcaagacaaggcctgaaagtatctgcagtgtaaccccttccactcatgacaagacattaggacccggagcggaggagaaacggaggtccatgagagatgacacaatgtggcagctctacgaatggcagcagcgtcagttttataacaaacagagcaccctccctcgacacagtactttgagtagtcccaaaaccatggtaaatatttctgaccagacaatgcactctattcccacatcaccttcccacgggtcaatagctgcttatcagggatactcccctcaacgaacttacagatcggaagtgtcttcaccaattcagagaggagatgtgacaatagaccgcagacacagggcccatcaccctaagcatgtctatgtgcctgacagaaggtcagtgccagctggcctgactttacagtctgttagtccccagagcctccaagggaaaacgtggggtagagaaaaggtggcgacggcgactggagcagcagaggctgtagcatcggatacccacctcccacgaaccggttcctcttccccctccttgctgtgtgtttgatgtgttgaagcaggagggagaacgccgcgagcagcgccgtgagcaacactaccatcgtccccagcactgcggatccgggccctagcggcgggcccagtagcggaggtggtggcggcggtggaggcggcggcatcgaggtaataggtgactgatctccccgggcgctagctctgagcagatgcggactctcttcggtttcctaggcaagatcgacgaaccacacctcttcccgccggataattcacctttgccaatcgcaatctcgttaaattccatgatccagactcagcagttgtcgcaccatgtctgacaaacactgtattccttgacagagctttgataacgtaccatatgcagaaggagttattcctgataaggctaaggcttgtctctgttggcaccagctaatgcaatggcaggtcttctgcttggtgttgggctcctgcctactcctaacccacttactcagactggcgctgttccaccggctgctttgggggctcctactcttgttcctgcccttgctgcgcttgggcttcctggagcaaacttgaactcaatctgttgccacagatagttgctgaagcttatgagcactgttggtcccaagttgaagcatgtagctgctggtcttgtttcaccaagtctgaaatcggatacctctagtaaagaaatagagaaaggggccccacatggtggctcaggccagtaatcccagagctttgggaggctgaggagggtggatcacttgaggtcaggagttcgagaccaacctgaccaacatggtgaaaccttgtctctactaaaaattcaaaattagccgggcatggtggcgcatgcctgtaatcccaaatacttaggaggctgaggcaggagaatcgcctgaaccctggaggcggaggttgcagtgagccgagattgtgccattgcactccagcctgggcaacgagcacaaaactcttggctcaaaaaaaaatagaggaagctatgaaaagagtacaagaagcacactgcctaatttcggctgctatagaaccagagaaagaaaaaagaaggcattcaagatcacattctaggaggaggaggactctcatcttctagacacagtcaaggagcagatcaagagagtgattacattgtcagtctaggagtcgttgatgattcaaaagcccaagacagagaagatctcattccagagagagaggcagaaggtcaaggagcacatcaaaaacgagagacagaaagaaagaagacaaaagaaacattcaaaaacacccccagaaagttacagcacggctagacattatagaagtacaaacagagagacaacaacgaagaagcaggagtggaacaagatctcctaaaaagtctcggtgtcctaaaagaaaattgtctctctcaccatcccctgggaaacataaaaagaagaagaaagataaagagagaaataggtatgaaagagaacgatcaacaagcaagaagaagagtaaagatagggaaaaggaccaggaaagaaaatcagagagtgatacagatgtaaaagttacacgggtttatgatgaagaggaacaagggtatgacagtgagagagaggaaaaaaagagaagaaagcaatagaagcagattcccctaaaacaaagaaacgttctgtggaaaagggaactggtgattcactaggagaacccatagtgaatgggaatgatcatcatgaagaagacatggatatgagtgactgaaaattgcctctatgggaatccagctgtatacatgcatcagtgtcattgctttgtgtaatttctgaatgttgtatttgttcatctcaaccctagatgtatatagctctgagttattaatggttataaagctcttgttattgatattacctatttacatcaaaaagcttttagaaaatggtatgatgtaagcaattcttgtcatggtgaaatctgatggtgtaacccgttttactattggcgctgcttcataacaaaaatgaaaagctatatacatctacagccagaatggattgtttatgtcatataatttcctttactaagttcacttacattacttacagagttttattcattgccataatagagccatgtaggaaatgcactgactgcatgttattgtggcaagaatatcctaaatgtcattaaaatcctccaacatgatggatctacttatggtcttgtttgttgacatgccaaattaacatagttccatctggaaatgagcatttgaaatgataatccggctgggcacagtggctcacccctgtaattttagcactttgggaggccgaaggggggcagatcacctgaggtaaggagttccagaccagcctggctaacatggcgaaaccttgtctctactaaaacacaaacgcgcgtgcgcgcgcgcgcacacacacacacacacacacacacacacacacacacacacaaaattagccaggcatggtggtacatgcctgtaatcccagctactccagattctgaggcaggagaatcacttgaacccaggaggcagagtttgcagtgagccgagattgcgctactgcactctagcctaggcgacagagcaagactccatctc

SEQ ID NO: 7939 - DNA, 2071 bp, Homo sapiens
  misc_feature (1751)..(1752): n is a, c, g, or t
  misc_feature (1754)..(1756): n is a, c, g, or t
  misc_feature (1760)..(1761): n is a, c, g, or t
  misc_feature (1763)..(1765): n is a, c, g, or t
  misc_feature (1769)..(1769): n is a, c, g, or t
  misc_feature (1771)..(1771): n is a, c, g, or t
  misc_feature (1776)..(1776): n is a, c, g, or t
gggacaagagagaagagagactgaaacagggagaagaggcaggagaggaggaggtggggagagcacgaagctggaggccgacactgagggagggcgggaggaggtgaagaaggagagaggggagaagaggcaggagctggaaaggagagagggaggaggaggaggagatgcgggatggagacctggagttaggtggcttgggagagcttaatgaaaagagaacggagaggaggtgtgggttaggaaccaagaggtagccctgggggcagcagaaggctgagaggagtaggaagatcaggagctagagggagactggagggttccgggaaaagagcagaggaaagaggaaagacacagagagacgggagagagaagaagagtgggtttgaagggcggatctcagtccctggctgctttggcatttggggaactgggactccctgtggggaggagaggaaagctggaagtcctggagggacagggtcccagaaggaggggacagaggagctgagagaggggggcagggcgttgggcaggggtccctcggaggcctcctggggatgggggctgcagctcgtctgagcgcccctcgagcgctggtactctgggctgcactgggggcagcagctcacatcggaccagcacctgaccccgaggactggtggagctacaaggataatctccagggaaacttcgtgccagggcctcctttctggggcctggtgaatgcagcgtggagtctgtgtgctgtggggaagcggcagagccccgtggatgtggagctgaagagggttctttatgacccctttctgcccccattaaggctcagcactggaggagagaagctccggggaaccttgtacaacaccggccgacatgtctccttcctgcctgcaccccgacctgtggtcaatgtgtctggaggtcccctcctttacagccaccgactcagtgaactgcggctgctgtttggagctcgcgacggagccggctcggaacatcagatcaaccaccagggcttctctgctgaggtgcagctcattcacttcaaccaggaactctacgggaatttcagcgctgcctcccgcggccccaatggcctggccattctcagcctctttgtcaacgttgccagtacctctaacccattcctcagtcgcctccttaaccgcgacaccatcactcgcatctcctacaagaatgatgcctactttcttcaagacctgagcctggagctcctgttccctgaatccttcggcttcatcacctatcagggctctctcagcaccccgccctgctccgagactgtcacctggatcctcattgaccgggccctcaatatcacctcccttcagatgcactccctgagactcctgagccagaatcctccatctcagatcttccagagcctcagcggtaacagccggcccctgcagcccttggcccacagggcactgaggggcaacagggacccccggcaccccgagaggcgctgccgaggccccaactaccgcctgcatgtggatggtgtcccccatggtcgctgagactccccttcgaggattgcacccgcccgtcctaagcctccccacaaggcgaggggagttacccctaaaacaaagctattaaagggacagaatacttcctgtttaaaaaaaaaaaaaaaaaaaaaaaaaaaaaaaaaacatttgggtattaaagaacagactttttccggaaaccaaaaaaaaaaaaaaaaaaaaaaaacacanncnnncccnncnnncccncnccccnggggggggggccccctaataatattccccgggggggggccccacttttttcgccgcccccccttttttttggaaaaaagggcgccccctttagggggccgtctttataaaaaaagagggcgggggcggcgttttttataagcaccgcgggggagagaaaacacccgcgcccggggggtatttttggagaaacacctcctctccttcgggggggggcccctatttgggggaaactcccccccccaagaaattattcccccccccgggagaaaaaaaaaaattttgtccggggggag

SEQ ID NO: 7940 - DNA, 3267 bp, Homo sapiens
  misc_feature (433)..(481): n is a, c, g, or t
gccagagcgtgagccgcgacctccgcgcaggtggtcgcgccggtctccgcggaaatgttgtccaaagttcttccagtcctcctaggcatcttattgatcctccagtcgagaacatgtatacagagaagtgctcaaatcataagtgtacagctgatgagttgtcaaaaaatgaccacagcggtgtaaagaaagccaaatcaaggacccgaatgtgagcaggacctcagaagccccctttgtcactgcctcccagcaaaggcagcactatccggacttctaacaccatcgggtcgagggacctcagactgaatcaaagaatgaagcctcttcccgtgatgttgtctatggcccccagccccagcctctggaaaatcagctcctctctgaggaaacaaagtcaactgagactgagactgggagcagagttggcaannnnnnnnnnnnnnnnnnnnnnnnnnnnnnnnnnnnnnnnnnnnnnnnncacaaactgcgccctggcattggagagaagcccactgtggtcactgttgagatctccgtcaacagccttggtcctctctctatcctagacatggaatacaccattgacatcatcttctcccagacctggaattctaagaggacccacgagcatgagatcaccatgcccaaccagatggtccgcatctacaaggatggcaaggtgttgtacacaattaggatgaccattgatgccggatgctcactccacatgctcagatttccaatggattctcactcttgccctctatctttctctagcttttcctatcctgagaatgagatgatctacaagtgggaaaatttcaagcttgaaatcaatgagaagaactcctggaagctcttccagtttgattttacaggagtgagcaacaaaactgaaataatcacaaccccagttggtgacttcatggtcatgacgattttcttcaatgtgagcaggcggtttggctatgttgcctttcaaaactatgtcccttcttccgtgaccacgatgctctcctgggtttccttttggatcaagacagagtctgctccagcccggacctctctagggatcacctctgttctgaccatgaccacgttgggcaccttttctcgtaagaatttcccgcgtgtctcctatatcacagccttggatttctatatcgccatctgcttcgtcttctgcttctgcgctctgttggagtttgctgtgctcaacttcctgatctacaaccagacaaaagcccatgcttctcctaaactccgccatcctcgtatcaatagccgtgcccatgcccgtacccgtgcacgttcccgagcctgtgcccgccaacatcaggaagcttttgtgtgccagattgtcaccactgagggaagtgatggagaggagcgcccgtcttgctcagcccagcagccccctagcccaggtagccctgagggtccccgcagcctctgctccaagctggcctgctgtgagtggtgcaagcgttttaagaagtacttctgcatggtccccgattgtgagggcagtacctggcagcagggccgcctctgcatccatgtctaccgcctggataactactcgagagttgttttcccagtgactttcttcttcttcaatgtgctctactggcttgtttgccttaacttgtaggtaccagctggtaccctgtggggcaacctctccagttccccaggaggtccaagccccttgccaagggagttgggggaaagcagcagcagcagcaggagcgactagagtttttcctgccccattccccaaacagaagcttgcagagggtttgtctttgctgcccctctcccctacctggcccattcactgagttttctcagcagaccatttcaaattattaataaatgggccacctccctcttcttcaaggagcatccgtgatgctcagtgttcaaaaccacagccacttagtgatcagctccctaaaaccatgcctaagtacaggcggattagctatcttccaacaatgctgaccaccagacaattactgcatttttccagaagcccactattgcctttgcagtgctttcggcccagttctggcctcagcctcaaagtgcaccgactagttgcttgcctatacctggcacctcattaagatgctgggcagcagtataacaggaggaagagatccctctcctttggtcagattattatgttctcagttctctctccctgctacccctttctctgcagatagatagacactggcattatccctttaggaagaggggggggcagcaagagagcctatttgggacagcattcctctctctctgctgctgtgacatctccctctccttgctggctccatctttcgtctgcactaccaattcaatgcccttcatccaatgggtatctatttttgtgtgtgattatagtaactactccctgctttatatgccaccctcttccttctctttgacccctgtgactctttctgtaactttcccagtgacttcccctagccctgaccaggcactaggccttggtgacttcctggggccaagaaactaaggaaactcggctttgcaacaggcattactcgccattgattggtgcccacccagggcacactgtcggagttctatcacttgcttgacccctggacccataaaccagtccactgttatacccggggcactctaaccatcacaatcaatcaatcaaattcccttaaatttgtatggcactggaactttggcaaagcacttttgacaagttgtgtctgattggagcttcatgatagccttgtgacatctttagggcaggattcttatccccattttgcagatgaaaaccctgagtcacagatttctgtgggactgtggatctcactggaagctatccaagagcccactgtcaccttctagaccacatgatagggctagacagctcagttcaccatgatttttttttgtcacctttgctggcacaccagtggcaaggcccagaatggcgacctctctttagctcaatttctgggcctgaggtgctcagactgcccccaagatcaaatctctcctggctgtagtaacccagtggaatgaatttggacatgccccaatgcttctatatgctaagtgaaatctgtgtctgtaatttgttggggggtggatagggtggggtctccatctactttttgtcaccatcatctgaaatggggaaatatgtaaataaatatatcagcaaagcaaaaaaaaaaaaaaaaaaaaacacgtttgcggccg

SEQ ID NO: 7941 - DNA, 2527 bp, Homo sapiens
cacgcgtccgcggacgcgtgtcctggctgccgcggcagggccgctatttgttgcggttggctacgccttccagctcaccaaaaacagtctaaaaaacaaccatttcctctctgctgagagccagggaaggcgagctctgcgcacacgggcgtccctgcagcagccactctgctttccaggaccggccaactgccctggaggcatccacacaggggcccaggcagcacagaggagctgtgaacccgctccacaccggccaccctgcccggagcctggcactcacagcaggccggtgctaaggagtgtggcgcgggctcgactcccactgctgccggcctcccgagtgactctgttttccactgctgcaggcgagaagaggcacgcgcggcacaggccggcctccgcttcccgggaagacggcgcactcctggccctgggttcttgctgctgcccaccctctgctccctgggatgggccccgaggcgagcagcttcagcacaggcctggccctgctccaggtgcaggaaggaggataaggccgggccgagaggcggcacacctggaccatcccatgggcctccgcccgcgccgccccgaggatgagtggtgatgtcctctagccacccctagcagcgtcggctctccctggacgtgcggccgcggactgggacttggctttctccggataagcggcggcaccggcgtcagcgatgaccgtgcagagactcgtggccgcggccgtgctggtggccctggtctcactcatcctcaacaacgtggcggccttcacctccaactgggtgtgccagacgctggaggatgggcgcaggcgcagcgtggggctgtggaggtcctgctggctggtggacaggacccggggagggccgagccctggggccagagccggccaggtggacgcacatgactgtgaggcgctgggctggggctccgaggcagccggcttccaggagtcccgaggcaccgtcaaactgcagttcgacatgatgcgcgcctgcaacctggtggccacggccgcgctcaccgcaggccagctcaccttcctcctggggctggtgggcctgcccctgctgtcacccgacgccccgtgctgggaggaggccatggccgctgcattccaactggcgagttttgtcctggtcatcgggctcgtgactttctacagaattggccatacaccaacctgtcctggtcctgctacctgaacattggcgcctgccttctggccacgctggcggcagccatgctcatctggaacattctccacaagagggaggactgcatggccccccgggtgattgtcatcagccgctccctgacagcgcgctttcgccgtgggctggacaatgactacgtggagtcaccatgctgagtcgcccttctcagcgttccatcgatgcacacctgctatcgtggaacagcctagaaaccaagggactccaccaccaagtcacttcccctgctcgtgcagaggcacgggatgagtctgggtgacctctgcgccatgcgtgcgagacacgtgtgcgtttactgttatgtcggtcatatgtctgtacgtgtcgtgggccaacctcgttctgcctccagctttcctggttagcgcaacgcggctccacgaccacacgcacttcagggtggaagctggaagctgagacacaggttaggtggcgcgaggctgccctgcgctccgctttgctttgggattaatttattctgcatctgctgagaggggcaccccagccatatcttacactttggtaaagcagaaaaccaggaaaattttcttaaaatatccacaatattccttgagtgagtcagaatctatagccggttagtgatggtttcagacagaatcgtgttcgtgtctgttttgctcgattcctttcctaagttaaataaatgcaagcctctgaacttctgtctataaaaaaaaaaaaaaaaaaaacaacaaccactcatcaaaacaaacacaaaaaacaaaagggggggccccccccccataaagtatttcccccggggggggcgcccccaatcttttgtcggcgcgctaacccccgtttttttgtgtacacaagggggggccctaatatgggatggcgctgtcattatataacaagccgagtagcggctaatcgcccccctatttattacaacaacacgtgctctgtgatacgggtggaacacaccttgcgtgcctactcgggggtcaccttttgtggttgggaggcagcccctcactactcttaggcgggggtgcgagccaaccacactattgggtggccacaacaataattgccttctatggcggacaactattatacgaaccgctctcatcgagcgggagccatgtactcatagcacccttctccagcagaggcgtatatccaacggtgcctacaaacaacctgtgggctgataaatatactcgatgcgcgtgataaaacaacctactgctgcgccagccgggagtagttgagtgcgtggctcaaactccactttatacccgggt

SEQ ID NO: 7942 - DNA, 4289 bp, Homo sapiens
  misc_feature (1617)..(1631): n is a, c, g, or t
  misc_feature (1940)..(1978): n is a, c, g, or t
tcccgaaaccagagggatggggccggctgtgcagtagaacggggatcgaaaagaggaaaacaagggcacgaagaccagcgagaaagaagaggacacctgggaaaggcggaagcagaagacggggaagggaaaagaaacccatagcaggtggaaaccagatctagagcaacaccgtcaggttcacagtttgtttttctagaagagaagaaagtacctgaggattgctcttttttcctaccgttaatgaaaactacttttgtcttcatcataaaagaaaaaactaaggggaggtaaaggcagtctcctgttttattagggggagaggtgaagggaaatccaggctcactttctgaataagccactgcctggtgcacagagcagaaccatcctggtttctgaagacacatccctttcagcagaattccagccggagtcgctggcacagttctatttttatatttaaatgtatgtctcccctggcctttttttttttttttttttttttttagcaacacttttcttgtttgtaaacgcgagtgaccagaaagtgtgaatgcggagtaggaatatttttcgtgttctcttttatctgcttgccttttttagagagtagcagtggttcctatttcggaaaaggacgttctaattcaaagctctctcccaatatatttacacgaatacgcatttagaaagggaggcagcttttgaggttgcaatcctactgagaaggatggaagaaggagccaggcaccgaaacaacaccgaaaagaaacacccaggtgggggcgagtcggacgccagccccgaggctggttccggagggggcggagtagccctgaagaaagagatcggattggtcagtgcctgtggtatcatcgtagggaacatcatcggctctggaatctttgtctcgccaaagggagtgctggagaatgctggttctgtgggccttgctctcatcgtctggattgtgacgggcttcatcacagttgtgggagccctctgctatgctgaactcggggtcaccatccccaaatctggaggtgactactcctatgtcaaggacatcttcggaggactggctgggttcctgaggctgtggattgctgtgctggtgatctaccccaccaaccaggctgtcatcgccctcaccttctccaactacgtgctgcagccgctcttccccacctgcttccccccagagtctggccttcggctcctggctgccatctgcttattgctcctcacatgggtcaactgttccagtgtgcggtgggccacccgggttcaagacatcttcacagctgggaagctcctggccttggccctgattatcatcatggggattgtacagatatgcaaaggagagtacttctggctggagccaaagaatgcatttgaggatttccaggaacctgacatcggcctcgtcgcactggctttccttcagggctcctttgcctatggaggctggaactttctgaattacgtgactgaggagcttgttgatccctacaagaaccttcccagagccatcttcatctccatcccactggtcacatttgtgtatgtctttgccaatgtcgcttatgtcactgcaatgtccccccaggagcnnnnnnnnnnnnnnnccgtcgctgtgacttttggagagaagctcctaggagtcatggcctggatcatgcccatttctgttgccctgtccacatttggaggagttaatgggtctctcttcacctcctctcggctgttcttcgctggagcccgagagggccaccttcccagtgtgttggccatgatccacgtgaagcgctgcaccccaatcccagccctgctcttcacatgcatctccaccctgctgatgctggtcaccagcgacatgtacacactcatcaactacgtgggcttcatcaactacctcttctatggggtcacggttnnnnnnnnnnnnnnnnnnnnnnnnnnnnnnnnnnnnnnnatatcccccgccccatcaagatcaacctgctgttccccatcatctacttgctgttctgggccttcctgctggtcttcagcctgtggtcagagccggtggtgtgtggcattggcctggccatcatgctgacaggagtgcctgtctatttcctgggtgtttactggcaacacaagcccaagtgtttcagtgacttcattgagctgctaaccctggtgagccagaagatgtgtgtggtcgtgtaccccgaggtggagcggggctcagggacagaggaggctaatgaggacatggaggagcagcagcagcccatgtaccaacccactcccacgaaggacaaggacgtggcggggcagccccagccctgaggaccaccattccctggctactctctccttcctcccccttttatcctacctccctgccttggtcccgccaacacatgcgagtacacacacacccctctctctgcttttgtcaggcagtggtaggactttggtgtgggtggtgagaaattgtaaacaaaaactgacattcatacccaaagaaccagcctctcaccccagggtccatgtcccaggccccactccagtgctgcccacactcccagctgctggaggagaggggagatgccaaggtgccctgcaggacctccctccgggccacaccctcagctgcctcttcaggaaccggagctcattactgccttccctcccagggaggccccttcagagaggagaggccaggagctgcattgtggggggacaggctcaagcaattctgtccccatcaaggggtcagctggagagacccaagaccctatctgttcaccagggacccaaaatccaaggggatgcttccctctgccctctttcctgcccctccccatcatacctgcacccaccccagccagggctccctgtccagaattcggttctcctcaggacgccaactcccagagctaaggaccaaggagaagaacagcctctccacccccaagccaggcggttgaggaacatattgagaaaggttcagattgcagaaacccagccctgcccctgcctcctgcatccagcccccaacatggtgccaaagcttccagaagccaaaaagcttctgatttttaaggtagtgggcatctctctcctaatgacgaagctgctcagcaactccacctgcccgccgcaggaaggagcagtcccctgctatccctgcagccactcccagcacacccgcacacagccagcaccaccgccccaccgtgcacttctcctctctgggccttggcttgggaccaggtacgaaggatccccaagcccttcaggcctgagatcagagccagatcagccttaagtcacctcccatccaagaacttggcctaaaaatactcccctatttctaaccctcaggacggatctgatattaaatgccttccctgggaggaagggtgctttccccctccctagaggtgcccattccataccctgggagactgaggagagcattggctgaagcccagttcctttcccatccatccccaactccaataatcccccactcctcgcaggtctcagtgtcatgctgtcttggggcagggtgaaagggtagtggcagcagggcgcccactctggagatcctcaaaaaaggccctcctctgtggctggcagcctctgacctttccctgggcttcaaaggaaggctatggagtttgctgtgggccctgcaaccttcccagccactcctgctgcactaaggacttaggatccttttatcacaaatcgggattctctcccccaccccgaattctgtctgcttaaactggaatacacaggagcccttcctggcctggatggtgtctcccagcttccccgcccagcttgcccaccccatagttggtgagatgccaagtttggtctgagttgtgaccccttcagagtagatgcccggcaggctggggttggcccctggagggtcaggggaccatcttcttattccctcttttctcattcctccaacttcctcccctccttcaattatttttttgtaaagttgatgccttactttttggataaatatttttgaagctggtatttctatttcttttggattttttttaatgtaaggttgttttgggggatggagttagaaccttaatgataatttctttcgtttggtgtaggttttagagatttgttttgtggagaggtttttttcttttgatgtaataaaatttaaaatggaaatgaaaaaaaaaaaaaaaaaaaaaaaaggtaaaaaaaaaaagacaaaaaaaaaaaaaaacaacaaaaaacaa

SEQ ID NO: 7943 - DNA, 2902 bp, Homo sapiens
  misc_feature (235)..(310): n is a, c, g, or t
ggcggggcccgaccggcgctctgtgtggccgaggccatgaagccgcagccgcccggctaggccccgggcggctctagcccagggcggcccgcggggcgctgggcctggctcccggctccggtttccgggccggcgggtggccgctcaccatgcccggcaagcaccagcatttccaggaacctgaggtcggctgctgcgggaaatacttcctgtttggcttcaacattgtcttctnnnnnnnnnnnnnnnnnnnnnnnnnnnnnnnnnnnnnnnnnnnnnnnnnnnnnnnnnnnnnnnnnnnnnnnnnnnnggactggattcgagaccagctcaacctcttcatcaacaacaacgtcaaggcctaccgggacgacattgacctccagaacctcattgactttgctcaggaatacgaggatgtcctcaacacccagtgtggctacgacgtccggctcaaactggagctggagcaacagggcttcatccacaccaaaggctgcgtgggccagtttgagaagtggctgcaggacaacctgattgtggtgccgggagtcttcatgggcatcgccctcctccaggtacccttgtggccccacgtgcccctccccttgccggggccgccctcactctcccctcacctgtcctctgtcttacagatctttggcatctgcctggcccagaacctcgtgagtgacatcaaggcagtgaaagccaactggtgaggccgccagaggccatggccacatgcctggcctacgcaggcctctggggggccccccaggaccctcctactatactcctgacgggcaaggctgcaggagatgttcctgctgggactgagccttgaggggttcgcctgaaccgctgtgctgtccacccacggaggaagttgctgtgcctccgcctgggcctcttgtcccatatgcgtgtgtacacacacatgcaggcacacgtgtgcacagggagccaccgtctcggctacatttggggtggtggactctccaggggactaggaagggcgcagctcagagggtgcaggccaagtggggtgggaggtgctgtgtggagggtcccccccgttccctgccccccagtgctgggacgcacctttctgtgcgtagctgtatggggcgcgttgcctgagccactgcctcacacagcttcagagcactcttttctatgagctgtaactttgagcctgccaggaacccacctcagcctcagtgtcccaaactctgaaatgggtccaagaattttctttctcttgcttgcctctcaggagcaaatggaatgatgactttgaaaaccactggcttacgcccaccatttccgaggtcctgtccacggcggggcctcagcagaactctctgactggggcccctggcccggccccacccagccgacatgttttctttggcctgggtggtttataccctgagccaacctttaaaaattggtagatttcacataaaagtccagatccacagcttctcttgaagaatgaccacctggctacgccggctcttcggtggcaacactacctgggacactgcctccccagtcaccaagggccccagctggcccgttctactcacctaagtgccgcctgacccttgtacactaggagctggcctcccacctctgcagggttatttcctgcacctcgaggccgctgcgggccaatctggagtgaaacacggggacctgaaggatggagaggctggaccccgctttgaagagggtgcagcctgggaagggcggccttgctggggactgcggtgggagtagagtgcccaggagagggtctgaggggtgggatgggggtcaggacaattttgcaaaagaagtagctggaagccatgggactggcgggagcctgtttgggggatctggatggttgactcctaggagtcaagttcagcatcttcgccgtggctgcagagctgcctgatgggcactagagggcacgccagccccacactccctgggtctggcttcctcccgcaacctcactctagtagagcctgtgcctgcctactagcgctctggggttcggagagtttgggaatttctcagagccaactggctcaggcttgggaaggctggctgctgccctcagctccgcctcatcagctatgtgaaggggtgtgtgtggagtgatcctgccgccccctccctgggctcgtccagagatctcaaactccgatgcccctggggccacgtatgttgtgtaaatggatgaaacaggcccttgagttgggagcctgcttcactttgacttttccactgttgctggagacaaagacatcgtgatgagagaaagttcgcacaatctagtcggtaacagccactttccttgagaccaagagagtgcggtggggatgggggggagagcacgggtccccgtctgacagtggccgctgccatattcaggtgtagctaattgctctggtgtgggaatgcaggcctaatgacagaaatctggagaagccagaaatacagatttgtatgtgagatgtcctgattttttaagttgttggcagaaattaattcagaaatcaaatctgcaggccaaacaaggtgcaggacccagctttggccccatgcccctgtaggtccctctgggacagtcaccgctggggtcctggctgctctgtcattgagggatgctgggcactgctgccgggtggccagggtatggggcatgtgcccagcaatgtggctccttggccccgctggccagtgtcctgggcccctgacaggcgctggctgtgagtggtttgtacatgctacaataaatgcagctggcagcattgaaaaaaaaaaaaaaaaaacgaccccgagtttattaatttatgtttccggaggaataaaacccttttttttgaaaagcggggccaca

SEQ ID NO: 7944 - DNA, 4481 bp, Homo sapiens
  misc_feature (1317)..(1333): n is a, c, g, or t
  misc_feature (2540)..(2540): n is a, c, g, or t
  misc_feature (2554)..(2560): n is a, c, g, or t
tgttcgcagcgttatttgcagtggctttggggactcagcagtggcaagtccctgtgcataatgtgaacctgcagacttcaagatggggcccctcctgcacccactaacatgtctgcccttttttgtttttatcctggaacaagtggagaaatggcagagctggctgactctggggacccttccctttttcccatggcttcatttcttcctcaccacaactaattcggggagctgagaagtcacacagggtattcctctcccttctctgatgttattaattaatagaccagagaataaggttgcagatattacatttgttgtgtttttgtgttttgtttttttttttaaggaaaatcccaaacaaagcccagcatgatttgagaaaagaggatgttttcccagggaaaataatttttttaacctgcctgagaatgatttatttatttgttggaggccattggtcagacagcctggagcttgggctgtggaagatttcaaaagcatagggctgtggtctctggaaacctattacagcctgcagctgtgagctgagccagtgacgaggtccctggaaactcaggaaggctgacaggtgggccttggggtattggtttgtggagaaggaagcattctttaggctgcggcactccttatagtttcccacccaccgagtgacattcaggcagaaattgagctcaggagacagccagccttcccacatcccacttcacttcccggtccacacgtaaagcagtgtgtctccaaggaggcagtgagcaattcccaaggtccccgtgttgtgagaagcgcgctgctttctccctttgcagggaaaaaaaaaggctttcctggtgagatcatgagtccttccggcttcatttctcattgtgggtttaacttctaaaacgcaaatggagtttagagaggatgagcagaaccacaggacctgcccccatctctcactcactgcaattgcttctactctgggcacaagtagggtgtctgaagaccatgtttccctctggttctctagtttgcagataacacagaagacactggctagaaccttaagctttctgccaaaaagatgcagagagcagggcagtagctactggcagtggggtgtgaataaagagtcctttcacaaccaagttcactgaggatttggagcaccagcttcccagcagtatcgaggggtggagaggtgtacattcaggtggaggggtacatctaggggtggagaggtgtacattctagaaacagctgttaacacactccactttaaagacagcaagctagacctccaggatcaaagcnnnnnnnnnnnnnnnnngttacaaatgtttatggggcccagaatactagcatagatgcgtgaaatggttggtgtgaggcaaaagggcatggtgggggcaaggatggggactgtggtcttactggcatgcacgtgacctacccagaatgagcagctgctactcagccccaacctgtcattgtttgtaaaaatgtaagcacagtgtagtggaatcttccaatttggaagggaagccggaaatccagatttaatggaaaaaatctgatttttcaacgtcgggttttttgtttgtttgtttttgttttttttaacagatagtgggcaaagaaaaattccactgttccacgtgtacactgccagcaacctctgctctctggagaggtggtttaaagtgagattatgcattgccctggtagaagaggaaaaaagccagcatcaggtcagggcaaaaataacagcccatgttgaactcggaatggggacctcttgctaagtcattccactcctcaagagaccattccacagaggggggatggatcattcagctctcctggtcccaagattgtgctgaagggaagaaggaatagaatctggagatctggactgctgccccttagatatgcagaggtccacatctgcctggggctacagcttgtgggactccatcaaaccaggccgaaatggcaaagacagtctaggaggaggaggaggtagggtgtgaaacagccaggctctctccaaatcccaagtgttgacacagccatcttgtcccatccctggaagcctctttggaaaccacatagagctgtgctggctcacgggatgtcctgtttgcttctgcctcagttaccttactttgcccatgggtctaccacaggcgctacctcattgtgtctgctgagaagtttacctgggaggggggaacaaagttgtccaaatctgcttgagctgaatgtatgatctatgcaaattctctctctcctctctctcttcctctctggctctcttagaagtttttttgttttgttttgttttgttttgtgtttaccttgcaaacaagatactgtataggaccctcttaagatggaggagggctttcttgcgccacctgtgtctacccctcacgttgtctttggctctggtcttaccaggcgtatgcagggagaaagtgacctctcttccctctccacttggctgggaatattccaactgcctctgcctacangataccacagaaannnnnnnctgcaccttgtcatccccctccctaacgtcatctactccatccctcatgttcctccaacttgcttctcccatccctccttcaaaaacaaaacaaaacaaaacaaaagccttaggtttctcctttttgaaatgtggccttaacattatttttgggaagctgaccatccatcctttccctcccatctccaccaacatcagagaagacagcatcgtgaagcttctgtggcagcctcctaaggaaggggctgccaatctgtagttggcagatgctataggaattgcttacaaatgtcgtctttaagaaaaatgttcttatatttttcctatgggcaaaatgaaggcttgggtgctcatctaaagctcagccaactcctgaagcactctctcagagcatactgctgctgtaatgggctggcttaattatcggcagagtgcttgaaaaggctttgcagacctcccctgcccccaagactgggtgactttatatgtacttcattcaagggtaaatcaggagacgttctccatttatctcttcgtccttcctgcctggaaagtgatagcactaaatattcccagcagatgggtagtgttctcaaaggaatcaccctttccctaccttcagactctattctttacccttccattgctccagtgctgatggaggccaaagacaaccccagggttttcataggaaattcactggaattgtgcgcaattgtctttgtagtccttttgccttttttttttttaaatattatgttgtcaatagcatttgtttgggtatttgttttagaggcctcactctaagttattaccgtccccttcattgttttcaaagacatgtggtgatatagtttttaaaaataactattttgttatagatcataatatgcataaaactgtacagaaatattttgtaatgtgttgattttaaaaaaagaatctgtaaataaagttttaaaaaaagaattcaaatggcacacgctgaaatatgtagatattttgctatttatttaaaggagtattttaagagatattgaactatctgaaattgaccagtaatcaaagttccaatcatctgaatgcttttccttgaggtagaatgtgagtctcagaaatgactgcattacctgcccttttttgcaccttttctgtctttttattttgcagaacaacaacaacaacaaaattgtgccttagctgtatttttttgtctaggggagtttgtttctgtctgacaaagcaacattttttgcagaaaacagtggatgtattaaatactgtatcataccaaaaacactgcaggtgtatatagatgctttctgtcatactgtgttttcagatgcagaattttaaaattaaaaaaacactgcctttatggaaaaaaaaaaaaaaatggcttcttttcagcaacattgtgcatctttacacaatctcatattctcttctgtcatctgcatggtgaagataggatgactatataatttatcatccaaactgggatacttttgagagttaaaggaagcaccacgtggatgggatgctgagactgcaggcataaatggcctatcctgggaaaacctgggtgtgtggacacatttccctcataaaaactgctgtcatcttctaactggattatagcaacaacctcctataagtacctcctggttgaggcaggaagtcatatgatttttaaagcccgtactgagtagagaataacacagaagggactgccatggaaaagtgcagttctataacccaactggttggttggtggcaaacgtgttttcctttcctctttaccacagagattactttcccagaatggcttgctcttagattgtgacatgtgaccaggcaagggaacgttgatggtttccaatgctgcttaagcaggctgtgatggaccggcctcggaatg

SEQ ID NO: 7945 - DNA, 2316 bp, Homo sapiens
agcggagtgcgttttcagaagacagtactccagtgataaggtatctacaccacttaataactgtacctggtaaggagatttaataaggctgagggtggtattaagtttctcagaacagactcatctttgcggatgcagttgcagaacaggaaacagacccagggagaagtttagtccccccagatctcattggccctccgcacaagccaagccacagccactcctgccacacaatcggattgctttcagcactcgcagccgtggaccgccgtgcggtcctttcctctgcagtgagccgatttgctctgccagcagctgtcggtgccgcgctcgacaccgagtcctagctaggcgctcacagaatacgcgctccctccctcccccttctctgtcccccgcctctcgctcaccccggcccactccagcggcgactttgagggattccctctctggcggcctctgcagcagcacagccggcctcattcggggcactgcgagtatggatctccaaggaagaggggtccccagcatcgacagacttcgagttctcctgatgttgttccatacaatggctcaaatcatggcagaacaagaagtggaaaatctctcaggcctttccactaaccctgaaaaagatatatttgtggtgcgggaaaatgggacgacgtgtctcatggcagagtttgcagccaaatttattgtaccttatgatgtgtgggccagcaactacgtagatctgatcacagaacaggccgatatcgcattgacccggggagctgaggtgaagggccgctgtggccacagccagtcggagctgcaagtgttctgggtggatcgcgcatatgcactcaaaatgctctttgtaaaggaaagccacaacatgtccaagggacctgaggcgacttggaggctgagcaaagtgcagtttgtctacgactcctcggagaaaacccacttcaaagacgcagtcagtgctgggaagcacacagccaactcgcaccacctctctgccttggtcacccccgctgggaagtcctatgagtgtcaagctcaacaaaccatttcactggcctctagtgatccgcagaagacggtcaccatgatcctgtctgcggtccacatccaaccttttgacattatctcagattttgtcttcagtgaagagcataaatgcccagtggatgagcgggagcaactggaagaaaccttgcccctgattttggggctcatcttgggcctcgtcatcatggtaacactcgcgatttaccacgtccaccacaaaatgactgccaaccaggtgcagatccctcgggacagatcccagtataagcacatgggctagaggccgttaggcaggcaccccctattcctgctcccccaactggatcaggtagaacaacaaaagcacttttccatcttgtacacgagatacaccaacatagctacaatcaaacaggcctgggtatctgaggcttgcttggcttgtgtccatgcttaaacccacggaagggggagactctttcggatttgtagggtgaaatggcaattattctctccatgctggggaggaggggaggagggtctcagacagctttcgtgctcatggtggcttggctttgactctccaaagagcaataaatgccacttggagctgtatctggccccaaagtttagggattgaaaacatgcttctttgaggaggaaacccctttaggttcagaagaatatggggtgctttgctcccttggacacagctggcttatcctatacagttgtcaatgcacacagaatacaacctcatgctccctgcagcaagacccctgaaagtgattcatgcttctggctggcattctgcatgtttagtgattgtcttgggaatgtttcactgctacccgcatccagcgactgcagcaccagaaaacgactaatgtaactatgcagagttgtttggacttcttcctgtgccaggtccaagtcgggggacctgaagaatcaatctgtgtgagtctgtttttcaaaatgaaataaaacacactattctctggcaaaaaaaaactttctttgaacaagaaaacaaagcttaaatggtgtctttggcgttcagaagagaaagaggaaaagattgagacggattttgcatgtttgcaagaggaaaaagtaaagacagggcacggaaaccaatgagggggaaggtggcttttctatggtgaaaaaaacatggatttttttgggcaaaataaatagttttattggcacctcttgacagtgggccctgcttctgagcgtcttgggcctgaggtggcattcactttggtt

SEQ ID NO: 7946 - DNA, 493 bp, Homo sapiens
tttttttttttttttttttttttttttttgttaaacattttatttatgtggccctctgaaacgagcaacctatgaaggcataaaataaaaagattttttttttaactcgggaggtaaagctagatatatcaattaggaactgattcatggtgtgatgtacacgacatgttgaaagaatgccaaaaaggcgcaaaccatcatacattaatacaaaggacaaaaacaaaaaaaaccccagcatcttcttgctatgaggcaataaggcactgctaagagacttgagcaccaaaatgattctctacaaattccttcctttttatactgcaaatactgcattattatattcaaacctttaaaaactaggtaatacttaagatttagagtcaacttactttgtgggaaattctatttgctgcttcttttaaaaacagattaaaataagctcttaaaaattaagtaacaataatcatatacaatacagatatataaaaag

SEQ ID NO: 7947 - DNA, 802 bp, Homo sapiens
ttttttttttttttttttggggcagaaaaaacaacatgggtttattttaaggtaagtacaacgattaagaccacgtaagacaaacacagatgaagttagagtttttaagcttttttttttttttcttttaggaatactcagggtggaacctactatacaaaaccatcacactttgtaaataaaaagtatcagatacttgacttctttatccaccaacaaaaaaataaattattttcttgttttgtaaaagacctacaatgggaaaaagaattatatctcataattgtacaggaaacaaaacccacatcggtttcttgaattcaatttggcagttagaaatggttgggcaagatgaaaaacttatccagtgaactcaactttaaatattatattaatggctctgaacaacaacaacaacaacaaaatagcctgattacaaatccacacatttgtacagcacggttggagaaatttaaaattacacacagcacatatattatctatagagacccccatacacctatggggacccctacagaaagtcactaggggctcgctatgggatttggtccataacttaacttttgaaagctcaggtcgagcacagcacagccgtcctggtaggggagggggattttaagaccaatactcattttgttgggctgcgtccctttggaggggtttcctgggatcccagaaacggggcggcgaattaaagttacctgcgctcttcacagacggctgggggctagcgtgcccgctctctgctcccgggtctgagaaaaggcctcgtgccgaattc

SEQ ID NO: 7948 - DNA, 1241 bp, Homo sapiens
  misc_feature (162)..(162): n is a, c, g, or t
gccgacccgaaatagtgggccagcacgtggctggtccaaaagcagcagctgcttaacatattgggtgtaggaagaaaaaacagggcaaggaacctggccagtactcctggaaagccctaaaatgcgctaagctccgtggtaaagataggcaagtggaaaatncgcaataagaggattaaaaatccacagtaggaactcgattccgtgctttagaagctttgggactgggtggagagtcatcaaacctccctagggtcaacttcattagctgtaaaataagggagttaacataaatattcttctagttttccttcccacagctttcactctctgagccagaagtctattacgctgtagtagatagtgcaaacaaaggtgattttgaagcaggcggtatttctaatgaagtattgggaagaatgcccaggttaaagagctccaacttaacctgagtgtgctacaggaagaggaatacaactatttcatggaaaatgagcctaaagagaacaatgaccacaggaacattctgacctatttgtttccttgacctggaagcaccacttcacagaatgacagattaggaaaggacattgaacatgatcacattttccagtggatcacactgaggctctgagaaaccaggtggctggcccaaggacagcctaggcaaacagtagtgaattcatgacaaaaatcctcatccatgacccttagactagtcctcctttacaccatgctatgactgtcttttttttttttttccgtcaccctctgcacttagttggtagaagtcaaattaagtttcatatcttcatgatattttacttattgcttaatgtagggaataagcgaattccttagagaagaactgggcaccaagttaaaatggaattacaaaatcctacgctgctgtaatccacttatacggggtacattggacctgctagagtgatggaatctttattactttttacaacaaattgtccttgaaaaactttttatttgctcccaaaaaggcttatttccatactaagtctaatattaagacaaaattgcttaaagcattatggatattcttctaaatgtaaatatgtttggtgaggatgttgaagctcaaagctaaatagaagctgaaaacggttgatttctccatttcaagagacttaacaagggagaacacacaaacacaaacattattctcctcacactattagaatcttaatgctcaaaaacaatacctg

SEQ ID NO: 7949 - DNA, 1118 bp, Homo sapiens
  misc_feature (432)..(440): n is a, c, g, or t
gggggactccactgatgtcgtggcgctttaggggaagaagttggtgtttcgctgggccctggtactgaagacgcggtccgggtcgcccctagctgtttcctactcacccaaagccccgcacccgccttttctctctctcctctggcaggatgaggcgtgcaggcctgggtgaaggagtacctcctggcaactatgggaactatggctatgctaatagtgggtatagtgcctgtgaagaagaaaatgagaggctcactgaaagtctgagaagcaaagtaactgctataaaatctctttccattgaaataggccatgaagttaaaacccagaataaattattagctgaaatggattcacaatttgattccacaactggatttctaggtttatgtcccatgtaaggaaacttagtgggagagtaacagaatgccnnnnnnnnncctcctggagctcttgaagtagtcagccagtttgtggtaaaatggtaattgaattttcctaactgcatcaactgtaatgatatactcccttctcctcctttatttagttaaaattgtaggctgatttctttttacctacaatcttcctaataatttttgatgataatgacccctcatttctttctgcccaaagacctcattctttaaataaaacttgttattttggcatatttctggtagggcccattgcacatgtgtatcagtatagttattatttcatattaactttatgaattctcttgacttggcttataatagttttatgatttttactacataggtagcacatttatcatttgtgacagaataatgtgaagttaagtaattactgaactttaaatggaaatagtatgcaagaaactcaggcattgaacttgaagataagagtattattgctttaatccagtgtatttgtttatggaaagaaaaacacaaaggcagactgttgagtaaaaaatattaaatattgttaaatattctgtattttggaatttatccatttataggcttcaaaagtaaatttttaaataaaataaaaaaaaaaaaaaaaaaaaaaaaaaaaaaaaaaaaaaaaaaaaaaaaaaaaaataaaaaaaaaaaaaaaaaaaaaaaacaaaa

SEQ ID NO: 7950 - DNA, 757 bp, Homo sapiens
  misc_feature (225)..(225): n is a, c, g, or t
cgtcacattttattagttaatactagctgtcataactgataatccttggtaactcaaactcagcttaataaaataaaagtacatttcttgctcatgtaaagcccaacttgaagtagattgaatgaccctgctccatacagtcattcagggacccagcctgcagaggttctgccatcttcaacctgtgtcttctttagttaacttactgccaatctccagccaggngacagaggagagggaaggcgtggagggttccaaaagggcctttttggccggagctcattctgttgtctgctacatttagacaactggaggggttggggcaagaaatgtagatccttgctggtctcatcccagcaataattttgcatattgaaaggagtgcacaaatctttgaacagctggccatctctgccttatggacaaaatgccatttgttttctgttcacatgtgggtctttcatgacctgtgagctccttggggtcaaaggctatatattattcaattctgttatccctagttcctagtatagtacagcaggtaaatagatgttttctgaattgaaagtaaaaaaaatcgtttttctgttggatgtcgggcaccataatagatgcttacatttttttttttggataaaggaggtttttttttaaaaaaaggaaagaataaaagaagaagaaaccatttgctataataaagatctgcaaagcatggtaccgggttccaggatggtaggtgttcaagaaacacatattg

SEQ ID NO: 7951 - DNA, 2092 bp, Homo sapiens
  misc_feature (2005)..(2023): n is a, c, g, or t
  misc_feature (2065)..(2083): n is a, c, g, or t
ccacccatctcccccccccccaaaaaaaaatgggagcaaactggaaggagtcatggcggatggtcaggtggcggaactgctgctccggcggctggaggcgtctgatggcggcctggacagcgccgagttggcggctgagctgggcatggagcaccaggcggtggtgggcgccgtgaagagccttcaggcgctgggcgaggtcatcgaggctgaacttcggtccaccaagcactgggagcttactgcggagggcgaggagattgcccgggagggcagccatgaggcccgtgtgtttcgaagcattcccccagagggcctggcccagagcgagcttatgcgactgcccagtggcaaagtgggcttcagcaaggccatgtccaacaagtggattcgggtggacaagagtgcggctgacgggccccgggtgttccgagtggtggacagcatggaggatgaggtgcagcggcggctccagctggtccgggggggacaggctgagaagctgggggagaaggagaggagcgagctgaggaagaggaagctgttggctgaagtgactctgaagacctactgggtgagcaaaggcagtgcctttagtaccagcatctccaagcaagagacagagctgagcccagagatgatctccagtggctcttggcgggaccggcccttcaagccctacaacttcttggcccacggtgtcctccccgacagcggccaccttcacccgctgctcaaggtccgctcccagttccgacagatcttcctggagatggggttcaccgagatgccgactgataacttcattgagagctccttctggaactttgacgccctcttccagccccagcagcacccagcccgtgaccagcacgacaccttcttccttcgagatccagcggaggccctgcagctcccaatggactatgtccagcgggtcaagcggacccactctcagggcggctacggctcacaggggtacaagtataactggaagctggacgaggcccggaaaaacctactgcgaacccacaccacatcagccagcgcccgtgcgctctaccgccttgcccagaagaagcccttcactccggtcaagtacttctccatcgaccgcgtattccggaatgagaccctggacgccacgcacctggctgagttccaccagatcgagggcgtggtggcggatcatggtctcaccttgggccacctcatgggcgttctgcgggagttcttcaccaagctgggtatcacgcaactccgcttcaagccagcctacaacccatacacagagcccagcatgatgttccagctaccaccaaggcctgaaagaagtgggtggaggtcggaaactcgggggtcttccgtccagagatgctgctgcccatggggcttcccgagaacgtgtcggtcattgcctggggcctctccctggagcgcccaacgatgatcaaatatggcatcaacaatatccgggagctggtgggccacaaggtgaacctgcagatggtgtatgacagtcccctgtgccgcctggatgccgagccgaggccccctcccacacaggaggctgcgtgacatgggccactctaggacaggtcatcctccccgagtccctgctgctgcgctcctttgcatccctggccagtgaccttgtatttatgaggcctctgtgaggccagcccccaccttcctctttcccacctgtcccaggaccagaatcccagggacagaggactgggtagcaggttccttctgttgtcctgtgtggtgtgtctactgtgagggtgggccctgaggagacctgtgggccacctattgtctaataaagtgggcagttgcccccaaaaaaaaaaaaaaaaaaaaaaaaaagaaaaaaaaaaataaaaaaaaagaaaaaacccgagggcttcttttgtcgggggggggaaaaaaaaggaagtggaagtggcaccgggggccttagccggtttccctgaaccagtttttctgtggaaaaaagggnnnnnnnnnnnnnnnnnnncccctatagggaagccggtatttaattgtcccaaaacccaannnnnnnnnnnnnnnnnnntgaaatccg

SEQ ID NO: 7952 - DNA, 2052 bp, Homo sapiens
  misc_feature (364)..(374): n is a, c, g, or t
  misc_feature (433)..(433): n is a, c, g, or t
  misc_feature (486)..(486): n is a, c, g, or t
ggatacgtcgacaatagatgacggggctcacgttgtacgttcacatcaggtcccggcccgccggaacctgggcgatccacgatgccgagtttgccacgctgcgacagcccataggcttgcccccccgggcattcgggtggactacgaacacaaactgaagccctaggacttgtcgcccgtttgcgctctcgccgaggcacaggctgctcgcggaccaccctgctccgaaaactaagaaggggaccagtagacggggtggattcgaggtggggacatgggacgcagcggtcggagccgcctggaggggtacccggtggtcccgatggagctatcatctttgagaggtaggtggtagcccattcannnnnnnnnnngatactggccggcatcagtggactgtcggcaggtcccaactggataaggaatttccaanttttccaaggcgttgacacggggcagtttgacctgtgttggcagccccagggnagctgggagccatcgcagcgccttcaaactgctacaactggataaggaattccaactcttccaaggcgtgacacgggcagttgacctgtgtgcagccccaggcagctggagccaggtgctgagccagaagatcgggggccaagggtccggccacgtggtggctgtggacctgcaggctatggctccactaccaggtgtggtacagatccagggggacatcacccagctgtccactgccaaggagatcatccagcactttaagggctgccctgcggacctagtggtgtgtgacggggctcctgatgtaaccggtctccatgatgttgatgagtatatgcaggcccagctcctcctagctgctctgaacattgctacacatgtcctgaagccagggggctgctttgtggccaagatattccgaggccgggatgtgacgctcctctacagccagctgcaggtcttcttctccagcgtgctgtgtgccaagcccaggagcagccggaactctagcatcgaggccttcgctgtctgtcagggctatgaccctcccgagggcttcatcccggacctgagcaaacccctgctggaccattcttacgatttcaaccagctggatggtcccacccgcatcattgtgccttttgtgacctgtggggacctgagctcctatgattcggaccgcagttacccactggacctagagggcggctcagagtacaagtacactccacccacacagccccccatctcgccaccataccaggaggcctgcacgttgaagaggaaggggcagctggccaaggagatccgcccccaggactgccccatcagcagagtggacacgtttccccagcccctggccgcccctcagtgccacaccctgctggcccctgagatggaagacaatgaaatgagttgttcaccttaacccattacgctggcaaactgatacaactcagaaactgctcaatgtcaggaaaaccggaacttgttgatgaacttgttttcaaaatatcatctcatcaacgaggcctggacaaacaagccctgaggagggatctgcaacaaccctgaagacaacaaggaaagaaaccatgaaagtctgtctgtactgcagtgggaattcttgagtgaggtcttacctcttctttaaacctcttcaggagtgtcctgattatgtccagaattttccctaaaggcagggattcttaacctggatagaagccaggggtaaccatgaacttgatggaagaaaatgttacatctttattttcagcaatgaaactgaaatttagccttactcccaagttataaatgctggcaacaaatcacagtagtaaaagcagtacctgggattttcccaccaatacaaaccagttacagcaactgtaatgtaacataaaaagggcatcttgaagtattgttcatatttgtcacctcttggaatgatagcagatcctgtaagttgatgtattaattaaaaagcccatatattactgcatctcaattttgtttcaatttaatatatagtaataattgtaattcaatgtaattggcttccattgt

SEQ ID NO: 7953 - DNA, 4340 bp, Homo sapiens
  misc_feature (3885)..(3885): n is a, c, g, or t
cgggaggtccccatagcgcccccggaggggtcctctccaagggtcccggggccgcgttcccccgccgcgcgttgttaccccccccggccttgtgttttttattacccgcccccttaggggcccccctttgccaaagaagccgggggccgccaaaatcgtggcccccctcggggtattttttgcccccccccccctttttgttttgtttcctgtttgctttgttgttttatttttttttttttttaagcacatgggaggagtgactttattcacaataggtaaaataaacataattaatttttaaaaggagaacaaatgaaattaagatagataattgcaataatcaataatattgttggtttaattcataaattaaagttcaagcctgatgccataactcataggtcttatatttatttttcccttatcctgttaaaagatgtgtgaggcagcccgagatataatttttgcctattcttttctcatccatgaggcatgaaatatcagccctaccgagtaatgtggagcaaatctattccagttaaaacttacagtgatttaaggacagacagatgtatattcacaatatttgtgcacaatacaccctggtcaatatcaaatggcaaatcctcaatatcttttcaaataggtgagtgtcaagatcatttaagggtagtgacaaataatcccaaactcataaataattccaaaccaatacaatttcactaaggacactgcacttagcactaggcattccatgttatagatcttcaacaatgtatagtaaatacctgtcaccaggtatagtaaatactatacgttgttataggagtatggaagagagtgtgtgtgtgtgtgtgtgtgtgtgtgtgtgtgtgtgtgtgtgtgatgtatacataacccttcaacagttttcctgatgctcaaatcccaggccaagcttccatcttggtctggcttcattatactgcttcacacattctcagactgcctcaccactggaagcacattcctacaagaagggtcatgatatcatagaacagcctcaaaaaaaaaaaatgcctgctgaagtaaattactgacagccactggacaaaaggcagtctggttactttaaattcatactcaacaatgaactcccccttttttttaccttatcagttattcacttgacttacaaactctaaatgcatattgtttcaaaaaatcaaatgtatgacttaaaagctggtattttcatctaccaattgacattcaaaagaatgtaatgttccaaatgctctgaatgccccaacactttaagcatatacttgcagccttttagagaaattattttgattacacagattctagattgtttgttttaagggaaaaaaaaatcagttgcattacttaataatcataacgtgcaatttgtcaaaatacaaattccagctcatctagtgaaactagagttccaaagctatccacattccttcccattcagtcaggtttagctagccagtaagtttccaaatccatcatggagcaaccttctctctgtcatcacaggttgttgatatcgtagctctgaggaacatctgagcttctgagacccagcttctgagatccagtaaagttcaacaagcattagtaggtcccagatggcacatttcagctgaacctggacaagtcactaaagccctatagtgcattctgaaagcctgggcgtgtcaccaggtatcctctttgtgagaccccgctgctccagtacattgatcttaagataccaacaatgatgtggtaaaataaaaatgaaatcctggggtgagagcattctcagccagtgtagctagtggatccagtttcctcagggactctacataatggaaattttaagttcctttgaaggttgagttccaaaagctggccttcaatttcacctgttgtcccagctacttgggaggctgaggtgggagaagcacttgagcccagaagttgaaggctgcagtgagctatgatggtgccactgttctccagcttgggcaacagagtgagacccagtctcttataattaatgaagaaatcttagaggcattcccttcagaaacaaaatcaggagcaatatcattattagtgtttgccatagtggggtgccctgccctatggtatgcagcctttgtaaactggccagaatccgtccacggtcggtggtcttcttatcaggagaaagttattgaaatagcctctcgtctaatcaaagctgtagcttctcaagtattgccatagaagagcagaagtcatcctgagcaaagctaaaggcaaaaaaacctaggctccagactgatacactggcttgataatccacactgtgagatgtcaccaaaagttgtctgatccagctgtggggacttggctccaagttgtctggatatccccatcaaatcttgataccttactagtctacatctttgttcacatataacacctgaatgaggatgagacaaaaaagtcttaaaaaaaaaaagattttgtcccactttttaatactcaaagatcaggttccttaaattaactttgaattaattggctgataatgtgattctgtctgatgcagtctccctctgtgacttccctctgtacagaatccagatgacccagatatggttgatgtcttcatggatcacttggatatagaccacaacaagaaaattgacttcactgagtttcttctgatggtattcaagttggctcaagcatattatgagtcattgcaggagtccaggacaagaaagcgtaggggatccagagttagccaggacagggacagtgagggacactcagaagactctgagaggcactctgggtcggcttccagaaaccatcatggatctgcgtgggagcagtcaagagatggctccagacaccccaggtcccatgatgaagacagagccagtcatgggcactctgcagacagctccagacaatcaggcactcgtcacgcagagacttcctctcgtggacagactgcatcatcccatgaacaggcaagatcaagtccaggagaaagacatggatccggccaccagcagtcagcagacagctccagacactcagccactgggcgcgggcaagcttcatctgcagtcagcgatcgtggacaccgggggtctagcggtagtcaggccagtgacagtgagggacattcagaaaactcagacacacaatcagtgtcaggccacggaaaggctgggctgagacagcagagccaccaagagtccacacgtggccggtcaggggaacggtctggacgttcagggtcttccctctaccaggtgagcactcatgaacagtcctgagttcttgcccattggaacggggcttggagcccaagttacttgggcaggcaaggcacaagggtatcccggccaacgaacgcaggcactgagaaacagcttcccaaggctacgtcaagcggttcccaaagaggggtccagggacgacccaattccgtggggaacccaaaaacccccccccctgtggtcgggggcgagggttttccccaaaaccgggggcaacgccaacggggcaacgcggcaaaagggaacccaaggcggccattcccattaacctcacagaagcgaaatccgcgtcagcatcacggtcctcggcacccacctttccaaggcggagatatccccccccaaatttccaaccgaagggcgcgcccggatggcagaagatcgtgccctcataaaagaggctctataacaattttttttttcccaacgacgcacctcgcttataatatagcagcgtgtgcgatggccaacaaaaaaagcgcgggctatcctcttggcacgttggccccattctcccattgtggcggcgcccaacgggtcccanaggggcactccccccaagcggaaaactgggtttgccaatattggcccatatggagccgcacccaatcagaccctgcagtaaaatcgtcccagcgggggcgccttttattatttaatacacgcccacacgcgtcgtcttttgccgtgggcgaacaaccgggggggcaataaaccccgaagagggttcccaacggggggcacccgaaacccggggggcgatttccccccaacgcggggccaaatcctgtttcccaacagggggtgggagttccccgggcgcacgagagtctgttccgaagagcagcccaaaaaagttttgtggtgccggtcaaacaatatatcgcacataagtatgacgtgtgaggaagacgctcaaccgccgccgaccagtacgctactaattaaagcatgatatatatacacccggacaccgcaccgccggaagaaaaacacgcg

SEQ ID NO: 7954 - DNA, 547 bp, Homo sapiens
  misc_feature (294)..(308): n is a, c, g, or t
tttttttttttttttttcatggaggcatcttctatattatggaaatctgaacaattgatataaaacatccttgaaggcaatgatggaaaatgacttacttagaaaacatgttaatatgtaatttctaaagacccagttctggctgcagcactatcatttgctatatgaatctgcacaggctgaattcactgctctgagattcagtgcattcatctaaaatgtattatatgcattattcacctcgttggggttgttttgaaccccaactgaagctcaaacatgtcaatacatcannnnnnnnnnnnnnnttttaattcttgaaactgttcttaacaaacagtatagatttgagttgtttatactgtcatagagtgaaaactatatgtgtgtttcactaaaggtctgagggaaaagataatttcagtatttcccactatcaaagcctcccatttcagaaggcatttggctcaaaatattgaaatttcaaaagttgggtgaaaacttggatcactattttcttatttccatgggtaggacctcccttgtg

SEQ ID NO: 7955 - DNA, 2717 bp, Homo sapiens
  misc_feature (29)..(88): n is a, c, g, or t
  misc_feature (343)..(360): n is a, c, g, or t
  misc_feature (2194)..(2194): n is a, c, g, or t
atcatgtgaccagaaaatggaggcgaatnnnnnnnnnnnnnnnnnnnnnnnnnnnnnnnnnnnnnnnnnnnnnnnnnnnnnnnnnnnntctcaccctccgttagaaagcctcctctcatcctcagaagactactgtcagaggatgtaggaatggacatcccctttgaagagggcgtgctgagtcccagtgctgcagacatgaggcctgaacctcctaattctctggatcttaatgacactcatcctcggagaatcaagctcacagccccaaatatcaatctttctctggaccaaagtgaaggatctattctctctgatgataacttggacagtcctgatgaannnnnnnnnnnnnnnnnngaacttgatacccccgatgaagcagattcttttgagtacactggccatgaagatcccacagccaacaaagattctggccaagagtcagagtctattccagaatatacggccgaagaggaacgggaggacaaccggctttggaggacagtggtcattggagaacaagagcagcgcattgacatgaaggtcatcgagccctacaggagagtcatttctcacggaggatactatggggacggtctaaatgccatcattgtgtttgccgcctgttttctgccagacagcagtcgggcggattaccactatgtcatggaaaatcttttcctatatgtaataagtactttcacactacagccgcagagctgagcagttcagcagaccgtatgtcccacaatgcctaaaacattgactatgtttacagaaaaagtttgctgacccctgctctagcaaacgcatcctttcctactccaccccaatttgtatttagatagtttctctaacagaacggacaaatgaggctgcaaactaatttatttttgtcaaaaatcaatgttttgacatccacagacagtgaaataaaagaaatggcttgctgaaaaacatgaggagtcctagccacaaaatcactgcttaggttgcaattgccaaaatgaagccttcttagaagcacttctttagtatatacaggtgttggctgaagtccgtgcctcactctgggaaccattcttagtctccagtgtctcgtattacaaagaagctggcagaaataaaaatgaaggggtgagagcggttccaccctagtctcatggtggaaaattcattggggagagctgtccaggatatttggagtcctgggtagaaggagcttgtaactactttaaagtcgacatctttgcacaggtgattgagtttctctgacctcattgcttcacctctgtctcctcccgtccttccgcacgtgcccacacacacgcagttcagccctctttcctccataagcctccatcgttttctcttttctcctcttgatcctttcaagcgagtatcttgttgaattgtatgttctgttggatctcctccttcataacatctggcttgttggacagaaaaaccctacagcccaccccctcccacagcccacctccacttttgaaagcccaaattacacctctcccagaacacagtgttgacgtaaatacagttacccaatattcctgtttgttcacctatttgctactttcactcagtagcatcccattttgtaaaatgaattccatggtcacactgtcacaggaagtaatgaaaaatccagtgttcagtgtagtggtgcaaacctgagggcatagagctgttcatagagggctcttgttatagccaaacagacacagcaacaatctcaccatttatatatatatttttaacttgtccagctcatctatggaaaactactcaggtggtatgctgtttgaagcctcatcttcctacatgaaaattatgggcatttgtcccaatgattttgtttcagctgttctgtaggctgcataaccactctgatatttaggtatctgctattttattatcttaaaagacaaattaatttaattgcatgtgctagggaaaagctaccatgtacattcaccccaagtaaatagaatcctagatgaatcctagaaaaataatccctaagcagataggtagacagaggtaaacattcacatgatttagctctctagctcttgcactctgaacattcttgctttggttctgacttctgggaactgctttgcatttctcctatagatctgtagttaagggaaccaaggggtcatggggncaaaggcattgtttctcaaagctccttgattaagagaaagaacagaaatttgcacagaagatagtgtcaaggagtgagaaagtttgtttgagggcagtagctcagtgtggaagaaaatcctgaagtttctgttgaagccatacaatgttctatggggttactctctaagacattctctgaggtgtgtgaggaagtcactactcctagcctttgttaagatgtaattttaaatattcagttatggtactatgtttgcaactctcgtcttatcacaatgcctcagtagtttgttcccttagaaacatttagatgtgcacaaattaatcttttatatatctaaaggtttttctatcatgcattggattgctcagaataaagtgtctgttagacttcgttttggtaaataaattctccataatgtagattaataatataaaagtctttaatgacacaatatatctatatagcctcactgtataattcagaaataaaaattgattctgcaaaaaaaaaaaaaaaaaaa

SEQ ID NO: 7956 - DNA, 1000 bp, Homo sapiens
  misc_feature (16)..(47): n is a, c, g, or t
gttccctaagaggaannnnnnnnnnnnnnnnnnnnnnnnnnnnnnnnacagtagaagcaggtatatcttccatgcagtttcagtagtaagcactacttatacctacataagagttaaaatccagatgtgggacctttgataccatcagtgatatatatttttttaaactggtacagagaagtgaaaagattaaattctacttctatttttctttttttttttttggagacggagtctcgctctggtcaccaaggccggagtgcaggggtgcgatctcggctcactggcaagctccgcctcccaggttcacgtcattctcctgcctcagcctcccgattagctggggactacaggcgcccaccaccacgcccggtaattttttggtgatttttagtagagaccggggtttcaccatgttagccaggatggtctcaatctcctgacctcatgatccgcccgtcttggcctcccaaagtgctgggattacaggcatgagcaactgcgcccagccaaattctacttcttaaaaatcacaaaaactagtttaaattgatgacttgttcgtatgttcaaaatgtaacaacaaaaaaagctaacaccagtcatttatattaactttttttttttaaatcaaaaattgttaatgttagaaacatactatgaagtgcctttatctgcttagacctaaggaagattttaaagttgggttgcacaggaaatgatgatgcttcaatttcttaatagttaaaaagtgctaaatactacttgaaattattgtttacagattagtgacaagagctggggttaggatccggttggactctgacatcggatgccctcaaacatacagaacttccaaactcaagtccagccataagctattttgccaacatgtcagagtaatctgtatttttgtatgtgatttctacttttatagacttgttttaaaacaataaaacacatttttataaaaaaaaaaaaaaaaaaaaaaaaaaaaaaa

SEQ ID NO: 7957 - DNA, 766 bp, Homo sapiens
  misc_feature (170)..(172): n is a, c, g, or t
  misc_feature (731)..(745): n is a, c, g, or t
aaaagatctgggctgggttctggctcagccactaactcacagtgtcactacggatgggtcactttctgtgttggttctctgtgagtaccctgtgctttcccagccaccgggtctcagccacgccttccctcatccttgctccccatcttttaggacaatagccggacggnnnaagcagttgttaaaccagaggtttgagagcctgtgcgcagtgctggaggagcgcaagggtgagctgctgcaggcgctggcccgggagcaagaggagaagctgcagccgtccgcggcctcatccgtcagtatggcgaccacctggaggcctcctctaagctggtggagtctgccatccagtccatggaagagccacaaatggcgctgtatctccagcaggccaaggagctgatcaataaggtcggggccatgtcgaaggtggagctggcagggcggccggagccaggctatgagagcatggagcaattcaccgtaagggtggagcacgtggccgaaatgctgcggaccatcgacttccagccaggcgcttccggggaggaagaggaggtggccccagacggagaggagggcagcgcggggccggaggaagagcggccggatgggccttagaggcctgcgccgacccgaccctgctcgagagcccgcgctagagtcggggaggatctgcgcagagaccgcagcatcacccaaatcggcgccggccccgggaggatctcaannnnnnnnnnnnnnngtcccagaaaaaaaaaaaaaa

SEQ ID NO: 7958 - DNA, 3347 bp, Homo sapiens
  misc_feature (148)..(148): n is a, c, g, or t
  misc_feature (154)..(154): n is a, c, g, or t
ggggggggcctgtcccggaggtggcggcggcgccatcttggcgaaggggggatcaggaagtgcggaccgcggcggcggcggcggcggcggcggcggcggaccggagcgcaggccggaggtcccggcccgccggccccggatcggaggnacgcgnaggatgcagcagccgcagccgcaggggcagcagcagccggggccggggcagcagctggggggccagggggcggcgccgggggccgggggcggcccaggggggggcccggggccggggccctgcctgaggcgagatctgaagctgctcgagttcatcttccaccgcggccacgagcgcttccgcattgccagcgcctgcttggacgagctgagctgcgagttcctgctggctggggccggaggggccggggcgggggccgcgcccggaccgcatctccccccacgggggtcggtgcctggggatcctgtccgcatccactgcaacatcacggagtcataccctgctgtgccccccatctggtcggtggagtctgatgaccctaacttggctgctgtcttggagaggctggtggacataaagaaagggaatactctgctattgcagcatctgaagaggatcatctccgacctgtgtaaactctataacctccctcagcatccagatgtggagatgctggatcaacccttgccagcagagcagtgcacacaggaagacgtgtcttcagaagatgaagatgaggagatgcctgaggacacagaagacttagatcactatgaaatgaaagaggaagagccagctgagggcaagaaatctgaagatgatggcattggaaaagaaaacttggccatcctagagaaaattaaaaagaaccagaggcaagattacttaaatggtgcagtgtctggctcggtgcaggccactgaccggctgatgaaggagctcagggatatataccgatcacagagtttcaaaggcggaaactatgcagtcgaactcgtgaatgacagtctgtatgattggaatgtcaaactcctcaaagttgaccaggacagcgctttgcacaacgatctccagatcctcaaagagaaagaaggagccgacttcattctacttaacttttcctttaaagataactttccctttgacccaccatttgtcagggttgtgtctccagtcctctctggagggtatgttctgggcggaggggccatctgcatggaacttctcaccaaacagggctggagcagtgcctactccatagagtcagtgatcatgcagatcagtgccacactggtgaaggggaaagcacgagtgcagtttggagccaacaaatctcaatacagtctgacaagagcacagcagtcctacaagtccttggtgcagatccacgaaaaaaacggctggtacacacccccaaaagaagacggctaaccctggagtatcacccttcctccctccccaggcaccactggaccaattacctttgaatgctgtatttggatctcacgctgcctctgtggttccctccctcatttttcctggacgtgatagctctgcctattgcaggacaatgatggctattctaaacgctaaggaaaaaaaacaaacacagaactgtttcaagtactcaagactgacttacagaccaaccaaccaccttgctggaacccttgctagcaggcattcttataaaagaaactttcgagcctccttatattgctggaaactcagctgtgctccagactagagcctccttacctatgctatggatttttaatttattttctcttatttcatgtacactgctttttttggttacagtgtatgatggatgtgtatgaaaaaaatgtatctttgggaaaacaattacagtttgttaatttgaagatgctggtcttgactcatctttatttttattcgcacatcccaccccatcccctgaactacttgggaggtggggaggggtacgagtccactgttgctttggtagagatgagaggccgcattttgctgctaaagcaagagaaacttggagctgaagcacacacctggtctgcccctagatttctcctcaaggcctctggagcaaccagcacctgcccccttggaatgcagagcctggcctgccaaactacaatgtggtaggctgaaacgatggtgttaattcttaggactacttttctagtcacagatgttttcaaatttctaagaaaaagaaaatgaggctcaagaggctgcttcgtagaattccttttgaatgaattgagtggggatggggacacagtctccaagtgtgtatgtggtcttttctgatctcagctgtgtggctgcaactcttcgctgttcattggttcctctcctggaaagtggcttctaaccagcactggatggtgatcattggtaagctttgctcacctccctctctcttgcttcatttggctttatcaaaaagaacagacctagctctgaatttgtttggcttgggaaattatggattctttcaagccactcccacaaggtgggtcctactagaaagggttagcattttaaggggggttgttctatacacctgtgtccttaccccaggctcaggaactgccagggagggaagatgaggtggggagtctgtactgagatggaactgtcagtgctgtgttgtatgtacttgctgttgtaaaagtttgggcatgactttgcatctagcgggtgctgcctgcatctctttgtctgtaagcttgctctgggactcagcctcttaggtcctacgatgccagcagctctcattaacagtgaaatgacagaggccaaagatggccaagtgaagacccaagtctcagaaaacccagacttgggacaactgcctgggaactaggatgctagagcagttctgtaatgctttgagacacagcaattttcacattggccattctttcccctcccctaccccttttcttttgagggacttttaatgtttgctgctttaggtggatggagagtccaccagtcccactcaatgctgctctaactctacccacacccacctaattaggggtgctaataaaacatgctgaggttgagataaagacgggacataaggggaaaattcattccatagagctgaaatctggttttcaaggcctctgtggctttcttctgaacttaccaccagccctggctggaatgtagattgtgtttttagtaatgtgtactgtgagctgtcttctgtataatgtattttgtaatgtatttttctcatctaccaaaggatgaaacaaataaaattatttaaatagtaaaaaaaaaaaaaaaaaatttgaagaaaaaaaaaaaaaaaaaaaaaaaaaaaaaaaaa

SEQ ID NO: 7959 - DNA, 464 bp, Homo sapiens
acaatttcaactatctgcctatccatgtgaaacatataaaactttagaatggtggttctgaatgctgactgtgcactgtggagttctttaaaaacagatccccaggctccacaccagaggtgtcctgacttgggtctcgggtgagcttaggcttgaagctgtggctgatgttttttaggagccgtaggtgcatataaagcacagtctcaggaatcggctttgggaatacagtttaaaaaaaaaaacactatatttttcaaagatatatattttttaaatatttatattacttctataacaaacaattcagttttaaaaactcatatgaccaacatattttaaatcaccattgtattgcatgggtctttagaaatataattgcaacaatcactgtcaattttttggccaaataattagtcatcaatattggtgaatttctaaaatatgcttgcagatgtaaaatt

SEQ ID NO: 7960 - DNA, 2131 bp, Homo sapiens
caggcactgggtggttctcacaaccagcagctcggctcactgagacccggtggtccagacgctgctcctggctggggtggcgctgcagggagaaccgcgagctctcaggggtcggcgggtgacttctttccggaagaaagcgaggaacgcgctctgcggggtgagccggactccccaactccggacgatcagcccaggactgagagccccgaagtccccaaccacaagtaagcggccccagaaggacaagtctaggtcgccgtccagagcgccatggccgcgcccgcccttcgtttgtgccacatcgccttccacgtgcccgccgggcagcccctagcccggaacctgcagcgcctcttcggcttccagcccctggcttcgcgggaggtggacggctggcggcagctagccctgcgcagcggcgacgcggtctttttggtgaacgagggcgcagggtctggagagccgctgtacggcctggatccgcgtcacgccgtgcccagcgccacaaacctgtgcttcgacgtggcggacgccggcgctgcaacccgggagctggcagcgctgggctgcagcgtgcctgtccctcccgttcgcgtgcgggacgcgcagggtgccgccacttacgccgtggtcagctcgcctgccggcatcctcagcctgaccttgctggagcgcgctggctaccgcggacccttcctacccggcttcaggcccgtgtcctctgcgcctggccccgggtgggtcagccgcgtggaccacctgaccttggcctgcacccccggcagctcccccacacttttgcgctggttccacgactgcctgggcttttgccacttgccgctgagcccaggtgaggatcccgagctgggcctcgaaatgacagcagggtttgggcttgggggactgaggcttacagccctgcaggcccagccgggcagcattgtccccactcttgttctggctgagtcccttccgggggcgacgacacgacaggaccaggtggagcagttcctggcccggcacaaggggccaggcctgcagcacgtggggctgtatacgcctaacattgtggaggccactgagggggtggcaactgctggaggccagttcctggctccccctggggcatactaccagcagccaggaaaggagaggcagatccgagctgcagggcacgagcctcatctgcttgctcgacaggggatcctgctagatggtgataaaggcaagtttctgcttcaggtcttcaccaagtccctttttactgaggacactttcttcctggagctgattcagaggcagggggccactggctttggtcagggcaacatcagagctctgtggcagtccgtacaggagcaatctgccaggagccaggaagcctaaggatgcccagggctgggtgcagccagctgtcctgcagctctggggagaccagcacagaactgaggaacatctgcaggaggcccaactagtgaaaggctttgcctccggggggcaggtgtgacttccatttcatcagtgcctgccagaagctgtgtctctcattgggctccaaagaggtgggattttttaaaactaaaacatttcttatatacagtctataataaatatgtaagatacaaagaacaataaaagaattacacactaggaaaaaaaaaaaaaaaaaaaactttcgagtcctccctgtgtcccgctgtgattctatttcctcccacccactcctcaaatcctgtcattattagccctttgcttttctgtattgtttcactccgtatgtaacataaccctaaataaattatttcgtatttgaggtaggaatttaaaacagaacaaatcttctcctgtgcttcctctccccctagggagcgaccactgcaggtggggaggggctgggtgagagttgagcccaactacctactccagagtgatgccaccactccaattagagctgacctgagacgtaaacagagggtgttgtgtgtcagccactggcaggttctccctgtagctgccttgccctttctcctgggggttggaagggcagattagtcttgacagaacacccccacatccaaccccatctgcccgggggctggctgggagttcagcagaaaaaagtataaac

SEQ ID NO: 7961 - DNA, 988 bp, Homo sapiens
  misc_feature (7)..(7): n is a, c, g, or t
  misc_feature (10)..(10): n is a, c, g, or t
  misc_feature (13)..(13): n is a, c, g, or t
  misc_feature (39)..(39): n is a, c, g, or t
  misc_feature (65)..(65): n is a, c, g, or t
  misc_feature (139)..(139): n is a, c, g, or t
ttttttntgngtngctggtgcgcctgcaggtgcccgggnaattcggccttatggccggggaaaanattattaaatgaaaaatgaaacaaatatgtaaataaaggaagacaagtagagccatatgttgcctaattatganaatgtataatgtatttattattattaacacacttctgaagcactcagtttcaacataaattgattaaatctgatacctatttgggtaaggaatatacatacagagacaagtacctagaaatcagtattgtttgtcctgcattatttacgatgttgctgtttcttaatgaacacaagaaaatatgatctagtctgggaatcatgagcaaatgacaggtgttaacgccattcatatttctgatgcaatctgtatgttcacagatattgatgatgtcatgagtgaatgtatacacaggagtgaatgtattcagttatttgaggaaggtaaagcagtgtttcttgactttggctctattgacattttgggtaattctctatggtgcaagattgtcttgtatattgtagggtgtgtagtaacttcattggcttctactcagtagatgccaatgttgaccctcctcccagtgtgacgatcaaacatttcttcagactttggcaaatttcatctgtggggggcaacattgtccccagttgagaaccactgaggtacaacatggactgaagaggagcatgtgttaaaaacgtgtgaattatttatcctgtagtatcttactgatgttcagataaagaaaaagcaaaacaaaagacctaaaactaggctcttcccccacggggtcaggttcatgtgtatagttgcatttaattgtattacgattctgggttgttgatgggctgatcatactgtgttttctccgaaaaaacaaagaattgttcatgagtacttactaaatgaataagtgaaatgacaaatgaataaagaaacacataaaggagaaaaaaaaaaaaaaaa

SEQ ID NO: 7962 - DNA, 1792 bp, Homo sapiens
ggcggcggcgtccgggctttgtggccgcggcgcgcgcggcggggcctggccggccgggggcgcgccgccgccgccgccgccgcccggcgttcgggagcccgcggccctcccggccgccctgcttgcgagaggagcccaggccgcccgccctcgcgcctcgccggcccctcccccggtcgccgcggctgccgcgccgccgctgcaggatagctagcggccaggagaaatacagtggaaaatgcaaaacaacgaaattataaagcctgccaaatacttctcagaattggaaaagagcatcctgctggctttagtagaaaagtataaatatgtgctggaatgtaagaaaagtgatgcgcgaactattgcccttaagcagcgtacctggcaggcgctggcccacgaatacaactctcagcccagcgtgtccctgcgggatttcaaacagctgaagaagtgctgggagaacatcaaggctcggaccaaaaaaattatggcccatgaaaggagagagaaagtgaaacggagcgtcagccctctcctgagtacccacgtcctagggaaggagaacgatcgccagcatgctgccggagcagctctacttcctgcagagccccccggaggaggagcccgaataccaccccgacgcctcagcccaagaatcatttgctgtttcaaatagagaactgtgcgatgatgagaaagagttcatacattttccagtatgtgaggggacctctcaacctgaaccctcgtgttcagctgtcagaataacagccaataaaaactacaggagcaaaacctctcaggaaggtgctttaaaaaagatgcatgaggaagaacaccatcaacaaatgtccatcttacaactgcaactgatacaaatgaatgaggtgcatgtggccaaaatccagcagatagagcgagagtgtgagatggcagaggaggaacacaggataaaaatggaagttctcaataaaaagaagatgtattgggaaagaaaactacaaacttttaccaaggaatggcctgtttcctcatttaaccggccctttcccaattcgccctaagactttgggggtggctctcttgtaattaatctgtgttggcaaagaatgtctggaacatggacttggcggtcagtaacctgtaacagagctacaactaggaaaattagagtggtagtagtcacttatttaagaattcattcaggtaaacagctgcaccctctgtaccccttaagtggcaaagaagctgttatagtcttctgaaaattatcactatgagtgctataattctgaatataatgtctcttaattagaattcatacaagaaaaaaaaaaaaaaaaagttgttgttgtttttttttttaatcaaatgcaagtgtgactataaaggagtgtggctgattttttttttttcttttttctttttaaacagacagcagaacttttctatccaaatgaatgccgtcccatggaaagtggctgtcctgggaggctacacgtttctccaatggtgatgctgttgctcagaacttgctagaggtctttagggaacctccgtgagagctgcagcacctttttaattttctcggtgtcatcctctgagtatggattttcttgtttttaaacagcccaaagtttagaagggtattttctaatgtggctcataaaccaccttttaaggcctttcctcaaacaggagttctaaataagtctccaacaatagtagttttgttggagctaaggatgtaactactttgaggaagaaatgttcgtttagatttctacat

SEQ ID NO: 7963 - DNA, 581 bp, Homo sapiens
ctgtggtcaagcagagcaccaggtcccactgcccggagccctgcacagccctccctcctgcctgggtgggggaggctggaggtcattggagaggctggactgctgccaccccgggtgctcccgctctgccatagcactgatcagtgacaatttacaggaatgtagcagcgatggaattacctggaacagttttttgtttttgtttttgtttttgtttttgtgggggggggcaactaaacaaacacaaagtattctgtgtcaggtattgggctggacagggcagttgtgtgttggggtggtttttttctctatttttttgtttgtttcttgttttttaataatgtttacaatctgcctcaatcactctgtcttttataaagattccacctccagtcctctctcctcccccctactcaggcccttgaggctattaggagatgcttgaagaactcaacaaaatcccaatccaagtcaaactttgcacatatttatatttatattcagaaaagaaacatttcagtaatttataataaagagcactattttttaatgaaaaaaaaaaaaaaaaaaaaaaaaccaaa

SEQ ID NO: 7964 - DNA, 1096 bp, Homo sapiens
tagaaggaacgagagaggatttaatgtgatttgttttgttgtttcttgttgtgttttatattattgttgtgttaggttgttgtagatgtggagtgtagtgtgtgttatttttatttactgtgagtatttattttgtggatgtttgttttagtttgttgatttgtgttattttattgatttttttattattattagttattgagctttttgttattccttttattgtgcgttaatattgtgagggaacacgatgtggttgtactagtttgtagttacctggtgttttaattggaacagggattgagaaatccgagtaggatcagtgcgcggaccatgtgaggtcatgattctcacatgtggttttcgtgccgtttttaagcacttgttctttaatttatgtatcttagttctgtaattcttcagagattttgaggcacagtctaagggatgtgctgtggtgctgtcgccgcaggcctggcccctggtgtgctggagctgcagcacctttgggagaggtcctgcgtcgtcctcagctgcgtcgctgtgaactcccgctctccactgtgttccttcagtgtctgcttttcaggaagtctgctgtgacctttgcccaacttctgagctcctcagggactaggaacaatttcagtagctttgccctgaaccaaacgagaaaacaaaagggaactcccgtatgacccacgtcacgtggtgcactcagagtgtgtgcggcatgatcctcggttgctcctcctctcactttagtagagtacgcggtggacagctgatctccttcagtcgtctacccacttccgtcattgtcctccgctagaataacagagtagttggtagtcatggccagaaggggggtgggggcagtgtgaggacttggggtttctgtgctgtgtgacacaaggagataagtgacaatcttgaagtcctaacttccactattctagaaagtatagtggtgatttgtgtgcaaagatttgaagttttaaaaaagtaccaagttcctgaaattcaataaaatatttttattaattttaaaaaaaaaaaaaaaaaaaaaaagtaatagtggaatagtgaaaaaaaa

SEQ ID NO: 7965 - DNA, 2070 bp, Homo sapiens
  misc_feature (2045)..(2045): n is a, c, g, or t
  misc_feature (2063)..(2064): n is a, c, g, or t
  misc_feature (2066)..(2066): n is a, c, g, or t
acccgggggacaaagccaaactgcgtttccaaaaaaaaaaaaaaaaaaaacccattaaaagaggcctccttcctccactctctcaacccctctgttgggtaacatgaaaagactgtattcctctaagatgttgggattgatatacgtgatttaatctgcaataggtggaataaccaggggaactggttatgaatatgtgaatgcaaccagcaaatttatccttgaaggtgtgatggtagaaataggaaaacaacaaaagaaaaacaataacaaaaaaagaaagtgtgatggctgggtgcagtggctcacgcctgtaatcccagcactttgggaggcttaggcggctggatcacctgaggtcaggagttcaagaccagccgtggtcaacgtggtgaaacgccgtttctactaaaaatatgaaaattagttgggtgtggtggcatgcgcttgtagtctcagctactccggaggctgaggcaggagaattgcttgaacctggaaggcagaggttgcagtgagccgaaatggcgccactgtactccaacctgggcgacagagcaagactccatctcataaattaaaaggaaagtatgatagtgttatggattttagctctgagtgagctggaaaactaggtcattatctagatgatttcagacttgaccctaattgaccatatatgaccaggaaacacttctgagtttacagctccgtggagatgacctcaacactgcctcttgatttgtttgatgcatgtcactttcattaattttccccctcctttttgaaagtcctgtggcagtactaatattttcattttatgtaatctctggtgctgctttccagtcactgtatgaagtgtctccccaacactagcaaatctaggtcctactaaatacaaatctctgggtggatgatcttctagtactgtatttttaaattaaggagttttagttataatgaaattgatttgtagtctgttttgccgtaaacttgtttttctttaaattgttcttacagtgatatcttactatttttaactgtctggggtttctgatatggggatttcagcccctggttaatcagtcttgtccctacaagtccctgatgcagtatgtttatttgtgatgtttaaagaacatttcttggctgggcgctgcggcttgcgcctgtaatctcagcactttgggaggctgaggtgggtggatcacctgaggttgggagttcgagaccagcctgacaaaacatagtgaaaccccgtctctactaaaaatacaaaaattagctgggcgtggtggtgggtgtctgtaatcccagctattcgggaggctgaggcaggagaatcgcttgaacccgggaggtggaggttgcagtgagctgagatcctgccactgcactccagtctgggtgacagagcaagactccatctcaaaaaataaataaatagaaagagagagagaggaaaaaaaaaagaaaagaacacttctttatttgagggactttcccaacaccaggtgcttggggatttcttagagatcaccaaccgactccctcactgtgaaattaaaccaagtactggaaacgtaactaaacagcgaaccatgtagcttcacctgactcagtgctgggggcctctaccatctactgtgcttgtgtcatgatgctttttctctgaagtggtgtgggaagtaccaggggactggcagaagcccaggccctctctacttttaccagcaactgatcatgtctttcagaatccatgtacatataggctgttctagccacagtggtagatttatgattcacatccgaaagtgtgccttagttatcaatttaacatttctctagtattcatatcccttttcttaccatatacctcagtgtatccttcctgtgtcaagccttataaatcatgtaatttagtgccactcatgtaaatcagtaaaatcacaaaggtctatttaatgaaaacgatttaccaatgttgtttttttttaacaagaaaaaaaataaaagcacattgtcattttttttcatcaaaaaanattaaaaaatgggggggnngnttgg

SEQ ID NO: 7966 - DNA, 3226 bp, Homo sapiens
  misc_feature (1648)..(1662): n is a, c, g, or t
  misc_feature (2817)..(2817): n is a, c, g, or t
agtaaatcatacctttgctcacttgatttgaatgaagattcttgtctaccaacagttttaggaaatagatggaatttgtgtagcatcaccacttcacggtaaaacagaagaaaaagatgaggtttctgcagttgtgatgcagaccgttgaaatgtgcctggagagaatgcccaactgggaaatcggttttcattcgggactacgtaggagtgtaacagaggacaagcatcatggctcaagaagcagggaggaaagtgtaacctggggaatgctgaccaggcatgaacattcttacatgttcaccataggaaaaaggtgtgagcacatgatgggaggctgttctatccaggaaagactggattccacccaactgtgacaaaggtcaccagtctcttcagaagatcatgcaattttgcaggcagtaatagctggtgatcttatgaagctaatagaaagctataaaaatggaggcagtctgctaattcagggaccagaccactgttcactccttcactacgcagctaaaaccggcaacggggagattgtgaaatatatccttgaccacggaccttccgagttattggatatggcagacagtgaaacgggtgagactgcactgcacaaggctgcctgccagcggaaccgggctgtgtgccagcttctggtggatgcaggagcatctctgagaaagacggactccaagggtaagacacctcaagaaagagcacagcaggctggggacccagacttggctgcttacctagaaagccgtcagaactataaggtcattggccatgaggacctggaaactgctgtttgaccctggtattcgggcaaagaggacatgagcaagcgtatcacatctgccctccctgcaattgggcagctcccctggaagaagctgatggaattcatatatctgtctctctcctgcaagaatctacctgagaccatgccactagcttttaagggctaccaagatgtacaacagaacatgatagcccattgagaaggaggcaggatacctggagatttgtggaatacagtacgagttccacaaaatttgatccttattgcttccagcaagtagcatgaacttctgtgttcacctgtataatttattttaaagattcaaaggatgttcgtataaatggcactgctccatcccccctatgcattggtttttttccctgtaccatacaattctactgtaactacccatcaacttaaagaaaaatattatctcttctctttacattcagtcttggaagaccacaagattgtctgaaggccttctaaaaccttctgaatgtcctgcagaaatataactgtaaaaccacttccatttctaagactaaatatatcaagactatttagtgactctctctgcatgtccccctcacccgccaaccctccgtttcattatataggagctgggaagtgccacatggataatgtcaacttgtgtgctatatctctgaggaatggtgaggtggcatgggagatgtctgtgcttggaggtacctcagagaggtaacccaggggtcagcccaggctgctgggctgtagccaatagccatgcaggactggttcagcttgggctgtctgtacagctccgtactgcctatgtgtagccatctttgccttnnnnnnnnnnnnnnnatgagcaaaggattaaacagaggcccacagctagtttgcagaaccactcaattttaagtgctgtttaaattgcagagcaaataatcctgtgtgggaactgtggttacaggaaatggagcactctaacaatgtttacttctaaactttgttgaatgataatagaaagcaccctaattgacttggaaaaaaaaaacagcaaaagcaaaagtagcaacatatgtcaacatatgtcactgaaataggaaacagtcattggaatgttgcacagaggctaatagctatggactgttggatacagtggtgagaggagccccattttaggtctttcttttaggtttttggttttcattactccaagtagcccttgacccaagaacaaaggcttgttgtatgagttccactgccagatttatgggatgcctggatcattcagaaggatgcttcaactattatttgtcaggtccaaaggtcgtacttgataaccccattttctatgtatggggtagtctaatatattattttatctactttatttttcccttttcagaaagtccttagtgcaaaccaccattggaatctagtcagaaatgtctgtcagatagttagaattgtaacatctaaacctgccacggatcgaatggtacttacaggtacctctcttagggactctgtgatccctaaaatatcagaagaaaatgtctgtctttctgtccaaatatctacttgacttgggggtaagtcaaaaataaaagtaggtgtccaaggattttacttttggcgaaatctgacgtctcctgagcttattttcattttgtccttggacatagcatagtgcttccctaatgtttctacatatgaccatgaatgatagtgtctctacatttaatttaaaagtctaatggtgacattttgcttatctgagtcacatttcggtaacatatcatcattttgaaagtgcggctatgacgtgctatattaaacaggaacagcctttcagtggatggggattttattaccacagtctttccatagtcatttcaaaatcaaattgttggtgggaggatggattgggttgtgagtaatctacttccatatatcagcctcagaaatggaactatcctttggatattacaggagacactgcagcagattgtncccagaagctggaaaaatatgctccaggagaatttaatcactgggcttttgctgggggatttttagttggcgggactgtcaaggaaatgtgatgacagaaatataatccttaacacaaactggaatctggctttgaatggcatcttccattccctggattgagtcaaatgtttggccaagcagtcagttatctagctgttactgttgggatgaagaactctgttttcatcaactaccatctcacatttctctaaatacttccaagtagcccagagaaaatttagggtacaggtggctatgggccaatttctaaatagctccaattgaagacataaatctgtgttatgaaaaatgatgagttggtactgtaagattcctgatgcatttggaaattttttcaaaccgaaaa

SEQ ID NO: 7967 - DNA, 1257 bp, Homo sapiens
gtagccaagcccctcagagggaatgggtgactagagtcatgtctgcctgaggttctgtccaagtacccctttgactctgcccatttgttgggggtctccaaggccacacactggagataagatccctggttcatccccactaatggcagctaaggccagcaggcctgggacttccccaggaggtctagactttcatctcccatcccaatccatcctcctctttgtctctttgcagggggaaccagggatcctggtcggccggggcctgtgggagagcaggttagttagccaacggtctctgaatgagtggctccatttattgggcccttactctgtgccaagccctttgcccagcaccctccatgcaccacctcgtgtaattctcagaacaactccagaggtaggttcagtcctctacccctttcacgaatgtggacggtgaccctcagaacggggaagtctgtaaatgagaaagctgtggatcatagtcacgacagcttttccccacagcctgactctacacacaggtttttggtgcatttgcccaaagaggttatgtgactgctcccccaggacattaaaactggaggagcccttggcagtcgttgctcgtgttcccatcagcttatagatcaggaagccaaaggccagagaagtgttaccacttgccaaggtcccttggtctaggcatccctaaattatatagaagatgaaatccaaaccagtggctctggctggttgagaagctgggtcaaggtctgaacaagagaagaggttgcaactagtcattaaaatgaaggtttgaggatcacgaccttcaattaaagtccagagaaacagctctgagggatgggcagagggacagcttcaatccttcctgcccagccctggggcctcctgaaagcttaacctcttggctccaaggtggagaggtgttcatctcctccactcctttaaatatggagctcattcctggaaggggcttcctcaatctggaaggactgatgctggggatggccatagaggaatttggccgcaccacgaaaccccgtcagtggcgtgagagtcacacacgatgggcttcctcaccaggcctgcaacatctgttgggggaagaaaggaattaaaacagggggaggcctggatttttgaaatctttccagtgtcattcgagcgcattctgtgggaagcccgggagtttggagaggctgccgcggcctggatatatttcctgattggaaaaaaaaaaaaaaaaaa

SEQ ID NO: 7968 - DNA, 1533 bp, Homo sapiens
  misc_feature (1466)..(1496): n is a, c, g, or t
ctcctgtccgctctgcgttgtctcccacctcgctcgctccagtctgtttccttgcctccccgctctttctttctgcgtcttgctctgggtgctctctttcgatgtcccataccaccacccccgactgtgctctgttcctctcccttctcgcacccgctctctctttgcgtcttttcccctctccgtcgtccctgtcgttttcttagtctctctccagccgccctgcgcctcttctctttttctatctctctcgcttctatttgtcggcctcgccgtggctgcattctctcagtcgtgtgcgttctgtgccaggcggcgcccgccgtccggttgcttttttatgtctggcccgccccctcctcttttttttttttttttttttttcttttttttttttttttttttttttttttttttttttttttttttttttttttttttttttttttttttttttttttttttttttttttttttttttttttttttttttttttaatgacagaaaagagaattatttaattttattaaaaatctccaatttataaccaaaatatacaaccactacatttaaaatcagtttgtacactcacagttaaagtgctaagaaaaaacatttacaaaaactgacatcagtctactgtaaacaaaataaatctacaagagcagagtgcaaagcacatcagagaatgtgaaattcccagttcatgctctaaccaagtgcacttgccctgtacatcccaacaacagcaacttttccactcatttggaagtgaacaattttaataaacatataaaaaagaaacatgaagaactaatgccacaaaatacaagtctttagcataaacactttctaattagatgtttatatgataaatcaacattagacatttagaatcacctcagcaatttgattcagaataaagtttggaaaactaaactgctaagtgccagctatttaaaaatgacatattttttagaataatgaaaaggaatactttttctacctttatagctcttgaaaaattgtaacagtaaaatggggaaagacttttttttttttttaacaagcatggatagtattcttatgtaaaggtagtatcaatgagaaagagctggaagacagacctagctgtctgtcaggtagaatgagggtgaaggagatctaggatgcttcaggcattgcgcttgaacttaaaaaacaggatcagcaggccctgacttcataaggcccataaatacaaatgactagctccctttctcaaggtcattgaaaatatacagtagtttcagacatcacatgggtttgggcaaagggggcagatttccaagctaggtcacttaatggtatctcttgcctcaaaatagtcccatcaacactaatttaaattatttccacttttgttttaaagcttaagattctactcactgacattaatttgagctaacagcaatgtgtttgcttnnnnnnnnnnnnnnnnnnnnnnnnnnnnnnnaaagggctatagtcactaacactttaatataaattag

SEQ ID NO: 7969 - DNA, 1099 bp, Homo sapiens
  misc_feature (23)..(23): n is a, c, g, or t
gacaccaacagggtttcaagggnaccaggagtcagaatttggggagacgcctcttccaaggccatcccagcccctatgctgcccatcccccagggctccccatcacccggagaggagaggacgccccaactaacccccgccatgccctcgggcctcccgagtggccggctgcaaccacggctcctctccagggtaggccagcttgaggaatcttatttattttatttatttacccaaatttgaactagtctgttgggttgggggaaggaggtggctgctacccccaagccttcccagtgctgacaaccccgggggcaggcgagggcgcccagtccctcaccatcggctgcacatcgcgccctcgggccctgccatgtccctggtgctactgacctctcaaggcttcctccaatctggggtcgggggaccctgggaggtgctttacagaccgctaataaaagacgatctgcgtgaacgccaccaaggcccttgccaccaagttctttggggctgggaagggaggaggtggggggcttgggccatgggaaacagaggggacaggatccccagctgctcgctgggcagtcagggaggaggaaagcagggaacttttgctcatcaacaggagaggaggtgggtgtgggtgctcaggttgagtccagagcccttgtccggctctttaggcccctttctggaagtttatgtgggtgcagaactggaaaaggagaaagaagaacgccaccaccagcaagcccaccaggatgtgatggaagagcccggggctggaacctgagttaatgaacacgatgggtttctctccaataaactgggccacagccagcagcctggcttggtctgagtccggataatcgaagaagtcaggtctgtctaagaagcgcggagactctgtccccagggctgacgccgtggcacgcttgggtctgggtgctaggacccaagcaaactctgtgacaacagccaagctgacccctgcctttatctctcgaggcggaagctgacttgggacccagtttctatggcccctagtgcagccagccacacccacaccagcacccatggccacagcctcatgactcct

SEQ ID NO: 7970 - DNA, 2682 bp, Homo sapiens
  misc_feature (2609)..(2609): n is a, c, g, or t
  misc_feature (2614)..(2614): n is a, c, g, or t
  misc_feature (2642)..(2642): n is a, c, g, or t
  misc_feature (2651)..(2651): n is a, c, g, or t
gcactagcaggaggttttagaatcgtctgagccctccttggctcttacaatgctcacttgttttcacaatgcagcaaaatgaaatgccttagaaaaagagtaacattccagaaaacggtgtaatttatttttcttccttaattgccccatctgtggaggatttctttgctgaacaccacatcaaagggatcttctgcatttaaaatagaagaggcatcatgctgaagagggaggggaaggtccaaccttacactaaaaccctggatggaggatggggatggatgattgtgattcattttttcctggtgaatgtgtttgtgatggggatgaccaagacttttgcaattttctttgtggtctttcaagaagagtttgaaggcacctcagagcaaattggttggattggatccatcatgtcatctcttcgtttttgtgcaggtcccctggttgctattatttgtgacatacttggagagaaaactacctccattcttggggctttcgttgttactggtggatatctgatcagcagctgggccacaagtattccttttctttgtgtgactatgggacttctacccggtttgggttctgctttcttataccaagtggctgctgtggtaactaccaaatacttcaaaaaacgattggctctttctacagctattgcccgttctgggatgggactgacttttcttttggcaccctttacaaaattcctgatagatctgtatgactggacaggagcccttatattatttggagctatcgcattgaatttggtgccttctagtatgctcttaagacccatccatatcaaaagtgagaacaattctggtattaaagataaaggcagcagtttgtctgcacatggtccagaggcacatgcaacagaaacacactgccatgagacagaagagtctaccatcaaggacagtactacgcagaaggctggactacctagcaaaaatttaacagtctcacaaaatcaaagtgaagagttctacaatgggcctaacaggaacagactgttattaaagagtgatgaagaaagtgataaggttatttcgtggagctgcaaacaactgtttgacatttctctctttagaaatcctttcttctacatatttacttggtcttttctcctcagtcagttagcatacttcatccctacctttcacctggtagccagagccaaaacactggggattgacatcatggatgcctcttaccttgtttctgtagcaggtatccttgagacggtcagtcagattatttctggatgggttgctgatcaaaactggattaagaagtatcattaccacaagtcttacctcatcctctgcggcatcactaacctgcttgctcctttagccaccacatttccactacttatgacctacaccatctgctttgccatctttgctggtggttacctggcattgatactgcctgtactggttgatctgtgtaggaattctacagtaaacaggtttttgggacttgccagtttctttgctgggatggctgtcctttctggaccacctatagcaggctggttatatgattatacccagacatacaatggctctttctacttctctggcatatgctatctcctctcttcagtttcctttttttttgtaccattggccgaaagatggaaaaacagtctgacctgaaagaaagaagactgcaatcaagtgagagctaaacaaaagaaaacctaaactaatgtcattggaaacaaaagcttgaaagaaacacatcgcatctacatttgtaacatgagaaggaaaacaatttttttttttttttttttgagacggagtctcgctctttcgcccaggctggagtgcagtggcgcaatctcggctcactgtaatctccgcctcctgggttcaagggattctcctgcctcagcctcccaagtagctgggactacaggcacacgccaccacacccagctaattttttgtatttttagtagaggcggggtttcaccatgttagccaggatggtctccatctcctgacctcgtgatccgcccgccttgtcctccaaagtgctgggattacaggcatgagccactgggcgcggccagataagtttttaaggttccttcttgctttagcattctgagaaatgtctaattggtagtaagacaagagtaatagcaacctgtattgttagtatttaaccaaataggctaaaattttaatcaggtaccttatgtattaaatagaaatcggaatgtaccataataaatccaaactctcaattacgccatggtaattcagtcactaaaatatgtaaagatagaaaattttttaatttaaagaagtgtgaaacatagccattgattgatcagaattctggaatctgaatattaaaaccttacttagtgactggaatggtatatgctccctccaaaagtttatctttgtttattgattaaaggtaatccttactttctttgtattacttaggttctcaattaaaggtaatccttactttctttgtattacttaggttcttaaatttctatgataaacatgtattgctaaataataaaaagtatataaaaatggcataaaaaacgaaaaaanaacancccctcccaacccacccacaccctatcncactatacnctaataaattgggacaatctccatactattt

SEQ ID NO: 7971 - DNA, 436 bp, Homo sapiens
ttcggcacgaggaaaaaagaaaaaaaaaaaaagtagggaattgcattagttccatatctccgcagagttctctggtagattaaatgttctctgtgcactaggccaaggaagttcctgttacctttgaaaatcattgtgtttgctctgattgtctacattagctcatatcagtcttttgaacactggttcaaatctgggtgttgggttaggatctgatgagtagagaatagtggaaagttgatataggaaggtatactggtttctggtgtgattctttagctacatttattccttgtcttatgtcatttcactggatcatgtaactgtcctggctttcagaaattatattagatgcccagcctttctcattcagagatgcctgtattattatgttatttcgattgcctaccaaaaaaaaaaaaaaaaaaaaaaggac

SEQ ID NO: 7972 - DNA, 515 bp, Homo sapiens
tttagcagtctaacccaacaaaggtttatttctcactcatgtcaccatccaaggcaggtcaggtaactcctgtgtggctttctccaagcagtaaagatgttcacatctggcaatttaggcatttcagagctcttcacttctggagccatagaaaggagtgaagaggagtggctgataatgcagcggggccagggggcgggggtgttatttccaggacagaaaacggcacaaagttttctgcttacttctgatgggctacacatcacataactccaaatcaactgcaacagaaatagggacttttccttgagccgcttgagtaacttccaacctcctaggcagatgatagcaaaggctggaggcatccagaagaaggctgattttccagaccttgtccaagctccacttgcagtgctctcggtatttgttatgcagaggtggccaactgagctgcagacttccctttcccccagggactccagaatgttcaagaagagcccatctacaggtctgaa

SEQ ID NO: 7973 - DNA, 2020 bp, Homo sapiens
ggacgtttccgctggcggcggcggcggcggcggtgccggagcgcgagcagagcgagacccccaggtcctgcgggcgcggaatatcctggaaccttcttttgtttgtcagcagccaaggtgtttccaggaagttcagagagaacagaatttaagaagtgcaacatggccaggggctgcctctgctgcttgaagtacatgatgttcctcttcaatttgatattctggctctgtggctgtgggctgctgggagtgggcatctggctctccgtgtcccaaggcaactttgccaccttctcccccagcttcccttcgttgtctgcagccaacctggtcattgccataggcaccattgtcatggtgacgggcttcctcggctgcctgggggccatcaaggaaaacaagtgcctcctcctcagctttttcatcgtcctgttggtcatcctcctagcagagctgatcttactcatcctcttctttgtctacatggacaaggtgaacgagaacgccaagaaggacctgaaggaaggcctgctgctgtaccacaccgagaacaacgtggggctgaagaacgcctggaacatcatccaggctgagatgcgatgctgtggtgtcactgactacacagactggtacccagtgctgggggagaacacggttcccgaccgctgctgcatggagaactcccagggctgcgggcgcaacgccaccacgcctttgtggagaacgggctgctatgaaaaggtgaagatgtggttcgatgacaataagcacgtgctgggcacggtggggatgtgcatcctcatcatgcagatcctgggcatggccttctccatgaccctcttccagcacatccaccggactggtaagaagtacgacgcatgagcgggctggccgggagtgcccaccccgccctgctgccctgtggagggaagaggattgagctttgtgtcacctgcctgcgctctccagatatgacccctgcacccaccccccacagcctgccctaccccacctaccctgcctcagcctcggacttctcagtgggtggagtgccagggaggaggaggcacacggagacctggggctcggggcccctggattcctgcatctgcatatgcgtatttgccaaagacgacagggtgggctggggtgcgctccggaggaacccccggcactgatgggcttctgcccctgcccttcctcacactgacactttgtccccacatggggtggggagcagagtgcccgccccgtggagataccgccccagcgggggctgcgacatccatggccaccatggggcacctggcggggcgggggtctgccggcctctgggcaaggcccctggagcatctcgcccaggctttttataccttacaatgtaacttttttattttattttactctatgattattcaggaatattatctctcagataagtttagggttagatttctgataaaaaaaaaaaaaaaatgttgatttctttaatggtttgactttttttccctgagggtgagggatgggtgggaagagaggacatctgtcccctcctctccagcccctgcccacccactggtggaggtgctaactagcagggacgtggcataggatgggagctgggcgtgaggtgcttggggtccattctttgtccctcagcttctcagagtccggccagcccttgtgttcccgtgccccacactttcctcctccccactgcagtgagtcaatagtccagggtggggcctggcctccctgccctgattggggactcaggaggtgaggcctggggggcttcctgccccctccttgcccacctgcctgcccccgggcagcacgggagggagagcagggtgagcacgcttgttggtttcagatgcactttctgcttgcattgccgtatctgtgcgttccttcatcctggtcctggctttatggaacaccatgtttttagcatgtttttaaataaaaacggataaagtgtcaaaagcaaaaaaaaaaaaaaaaaaaaaaaaaaaaa

SEQ ID NO: 7974 - DNA, 2216 bp, Homo sapiens
  misc_feature (987)..(1021): n is a, c, g, or t
cttacccgcgaggctttgcggtggctgcttggcttggcggtggtcgcttggcttggcgtggcagtgatcgcttggcttggcatttctggcttggcggtcctcctttcgcagattggaaaccgcgggctatcctgctgggaggttgtggccgaggcagtagctcgctactgatggcctcctggggtggagaaaagcggggaggggctgaggggtctccgaagctggcagtctacgccacgaggaagacccgtagcgtcaggagccaggaggaccagtggtacttgggctacccgggggaccagtggtcttcgggcttctcctacagctggtggaaaaatagcgtcggcagcgagagcaagcacggtgagggcgccttagaccagccccagcacgacgtccgcctggaagatcttggcgagctccacagagctgcccggtcgggcgacgtccctggggtggagcacgtcttggctcctggagacactggcgtggacaagagggataggaagaagagcattcagcaactagttcctgaatataaggaaaaacagacacctgaaagtcttcctcaaaataacaatccagattggcatcctactaatttgacccttagtgatgagacttgtcagagatccaagaatctgaaagttggtgataaaagtccatctgtatcaccatcaatgcctgaaaatcagtcagcaaccaaagaactgggacagatgaacttaacagaacgagaaaaaatggacactggagttgtacttctctcagggaatgatactctccatgacctgtgccaatcacagctaccagaaaacaaagagagcaaagaagaacaagacttggagctgacatcagaggaagagcaagaaagacttaaaggatgcgaaaataagcagccacagaaaacgtctcaagaaccagaaatggctaaggattgtgatagagaggatatacctatatatccagtacttcctcatgtgcaannnnnnnnnnnnnnnnnnnnnnnnnnnnnnnnnnnagagtggaaaaaccaattaaaactcgtcataaatgagttaaagcagaggtttggtgaaatttatgaaaaatacaaaattccggcttgtcctgaggaagagccactacttgataactctacaagaggaacagatgtgaaggatattccctttaatttgacaaataacatacctggttgtgaggaagaagatgcatctgaaatatctgtctcagtggtattcgagacatttcctgaacaaaaagaacccagtctcaacaatatcatccatccatactatcatccgtactctgggtcccaggaacatgtttgccagtcatcttctaagcttcatttacatgaaaataaattagactgcgacaatgataacaaactaggcattggacatatttttagtacagataacaactttcataatgatgcaagcactaagaaagcaaggaacccagaagtggttacggttgaaatgaaagaagaccaagagtttgatttgcaaatgacaaaaaatatgaaccaaaatagtgacagtggcagtacaaataactataaaagcctgaaacctaaattagaaaatctgagttctttaccaccagattctgacagaacatcagaagtatatctacatgaagaattacagcaagacatgcaaaagtttaagaatgaggtcaacacattagaagaagagttcctggctttgaagaaagaaaatgttcaacttcataaagaggttgaagaagaaatggagaagcacagaagtaatagcacagaattatcaggaaccctaactgatggtactactgttggcaatgatgatgatggactaaatcagcagattcctaggaaggaaaatgaagagcatgacaggtaagcctatagcagcgtttaacaggagacaattggtcaagcgtggtggctcacgcctgtagtccagcaatttgggaggccaaggcgggtgaatcacctgaggtcaggagttcaagaccagcctgaccaacatggatgaaccccatctctgctaaaaatacaaaattagccgggcgtagtggtgcatgcctgtaatcccagttactcaggaggctgaggcaggagagtcgtttgaacctgggaggcgggggttgtggtgggccgtgatcatgccattgcactcgagcctgggcaacaagagtaaaactccatttcaaaaaaaaaaaaaaaaaaa

SEQ ID NO: 7975 - DNA, 2188 bp, Homo sapiens
acaaagcggttggttgcggcagggactacaccggtgtatcatggcacgagggcccgggctacacgttaaaaacactaaggggagcgcgcgaagctgaacttggcgctcgatgggggccgttagccgccctagagcgcgcggagccgcagaggcgtagctggactacaacgcagtgcatctcgggaggccaactcgactggactgggtgagaggacagaggtggctcgatgggcggcccgaaggccggggatcatggcgggaaggcgggcccagccaggttcagccccgccccgacccgccgctccccacccccggccggcctcgcgtgccttcccgcagcactgccgtccccgggatgctgagcgcccaccgtctccccgcagccccctcatgcccggctgcgagctgcccgtgggcacctgcccggacatgtgcccggccgccgagcgcgcccagcgcgaaagggagcaccgcctgcaccgcttggaggtggtgccgggttgccgccaggacccgccccgcgcggatccgcagcgcgcggtgaaggagtacagccgacccgccgccggcaagccccggcccccgcccagccagttgcgtccgccctccgtgctgctggccaccgtgcgctacctggccggtgaggtggcggagagcgccgacatcgcccgcgccgaggtggccagcttcgtggcagaccgcttgcgagctgtgcgcctggacctggcgctgcagggagcgggcgacgccgaggcagcggtggtgctggaggcggcgctggccacgctgctggccgtagtggcgcggctcgggcccgacgcggcgcggggacccgcggacccggtgctgctgcaggcccaggtgcaggagggcttcggctcgctgcggcgctgctacgcgcggggcgccgggccgcacccccgccaacccgccttccagggcctctttggcggctgggcagagcgtggggacaggagcccaccatgacagtggaggctcggtggaagccctgcatgaggttctacagctgcctgctgccctgcgcgcctgcccgcccctccgcaaggccttggcggtagatgctgccttccgagagggcaatgctgcccgcctgttccgtctgctccagaccctgccctacctgccaagttgcgctgtgcagtgccatgtgggccatgcccgccgggaagccctggcccgcttcgctcgtgcctttagcacccccaagggccagaccttgcctctgggcttcatggtcaacctcttggccctggatggactcagggaagcacgggacctgtgccaggcccacgggctgcccttggacggagaggagagagttgtgttcctgaggggtcgctacgtggaggaagggctaccgcctgccagtacgtgcaaggtgttagtggagagcaaacttcgaggacgtaccctggaggaggtggtcatggcagaggaggaagatgagggcacggacagacctgggtccccagcctgaggagggagcgtgagcctcccagagccccaggactgggccagagcacttaggtttctttttccatggtttccaggtaataaaaggaacttgttttgttggtaaaaaaaaaaaaaaaaaaaaaaaaaaaaaaaaaaaaagaaccccaacccaacgccccccccaaaaacacccaaggttacccccccccctccggtcccccgcggcggggctccttaataaggggtgcgccagtatccgggacgcacaatcacgcgcttaatgtttgacccccgggtaatgtacgacaccttgggggacttggaacttaatcgcgcccgtggccccgcggttacctgcgcacggcttggcccccaggacacacgccaagctccgcccggcccaccggggaaaaaaaccacatgactgcggagacggaacacggcatcaacgcaccccaccccgccagagtcaagaaacgcacgagcgggagacgtgggggtcaatcttgaacgagcgtgtatacggggcgctcaaccaacacgacacggtcagggggaaatccacagctgtataccggccactctcaccaaggcgcgacacaacacgcgcggaacgacccggcgggcaggattggatacttcagccgggcatattggcatggaacacaaaaggggccgccagaccccgatattcgggtgtcggtgcactata

SEQ ID NO: 7976 - DNA, 3686 bp, Homo sapiens [sequence omitted]

SEQ ID NO: 7977 - DNA, 3941 bp, Homo sapiens
ctccagctccccacatctcctcctccagcttttccaaatcctggggcaggtgcatgtgcagctccttggggaaggctcctgcttattctgcagattgtcttgcatcatcaagattggtgcttgtgagagagagataggtgcagctctagtttttccccagtctctgtcactttacagccgccttccctcccaactgtcagaacagctgactgcaggcccagtgtcagacgcagaagcagcagatttacacagacggcatgactagtgcctctcattccctaaggtctgattcctctgatcaatccttaatattactcatagttgttctgcttctcccatcacaggcttttaaatattgtgtgggtcagagagagtcaaaacaggtaccactggagaaactacaccccattctgattcccaaagcatagcggcagatgtctggagaagtagttccttggccaaggtagatggacaatgtcatggtgccataatcaggcaaaaataaaggaatctgtcctcactacagcacagcctgtccccaggctcctgattatttttgtttttaccacctccaaggaagacatagtgtttgtcacttaggatgatgaccgagccacacataggtaatataacccagtagccagagggagtggtttttaaacatttggacagatcttacagtactggtcagaaagtgaaaaaagcagtgtggtctttgggtttgaggttttgtgcccgtgaccgggtcatgcaggttacttttgctcagtagttgatcatttgttctgttgtttttgttgcaagagagacatccagacctactcacacccaaaccttgatttctcccccttcattctgaacccttcagtttattagtatttgcccattcgtttagtccacaaatgcatctgtgctaggtgctggggatagaattgtgagtaaagctaaacagtccctgcctcgtggatgtttacatgctattggaagagacagacaggaaacaattgtggtaagtccaacaagggagaggtattaggtggtaaaagagtgtctcctgccagctctgacctgctgaaggggtcagagaatagtagaaaccaactcctggtgaggggctggtagagcagtgggcaggcactggctggcagctcactggcacctggcggaacaccaagaggtgggatggtggtgtgccgggtcatggttaacagccagttctcagggacaaaaaggcctgatcctagcattttccaaaaagaccagaaaagtccgaaagccccagccctgcctgctgcagctgcctccaccttcaggccgcagctcagcagcctgaaccttcgggtgtttcagagatatctgttcccataatgaaatcctcacccattcagcctgagaagccatagcttcttgcagcagaagagacgagagaaggagtctgtggaaaactgcctctgaaattccataagaaatttctcaagaaacctgattctccttttagaaacattaatggtaacttagcattttagcttctactctggctctctctccgcccttggtcctaccaccaccccctcctgaagtctgaccaggtctcctctagttggtaatggcagcagtcagcatgcctctcacctgtccatcagtgatgaggggtgattactccccttgtccctgcaggctcctcagcactaccctgcaaccagccatacccagggacacacaggagggaagggagttaactggctccatccagctaagtgagggcgggtgggggtctgggcagcaggctgtgagaagttcacagtttgtccatgagctttacgcttcctgagaagagaatgcaattaagcaggtaggtgcatttggctttttaacacttctgtagttaatcgctctttctctgccttctttcttctggccttgtgctcctagtatcagctgtgtaatctgatagcttcattttttcttttaaatggctggcatctcaaagactactatatgcatgttgattagacttagaacattttgggttttatgttagtctgaatccagaatatcagagacaactattttctctctctgctttttactttttttgtctaactcttcatctcataggcctcccagtagcattggatgcaggaaaaaatacattgacggtgaaaaacaagccgaaccagttgtagttttagatcctgtttctacacatgaaccccaaaccaaagaccaggttgctgaaaaagatccaactcaacacaaggaggatgaaggcgaaattcaaccagaaaacaaagaagacagcattgaaaacgtgagagagacagacagctccaactgctgatccataaaccagaagcctgacatgtttggaagtccttttcaataagcacatgattagtgttgttatattggcaagggctgtagacattctgctctggtcactgtattcagaatacaggttcttttctggtgtcacttttgtaagtagcaactataaacataagtaagctgtttagcaaaacacacattcctagtaggttttggttttttgatctttataaagatgaggtttttttcctagttgctgtattaagtatgacttcttttagaaggttacaaaaaaattcagatgttgatacctttttaggaaatgtgcataccactcatcaaatggaatgctgaaagtttgaggtgcttgtatataatcggataaacaaaactgatcaacccaatgtgattttaaaagcccccaaagaagcttctgttttgggtctgatcctcttgatggagaaactgcagcagcatggaaattgttgggtactgtggcatacaagttattttctacagtagactgagataaactgaaaactcaggagctggcatcaaactcgtagtcccatagtcagtgttaattacacacattgttaactattggatgaaaaatacatgctattgattgtgtccaaagcctcccgaggacctccgtggggatgctctggtagcctgaatacagaactgaggtgaaagtccaaaccttgaattttacagtagtaagttggtaaaccatgtgctctgtgctgtgagttaattatgttttcccaaatactaatgtggcacaagtaccatattttatcagagttcttatgtacagtatggtgaagataagtgacaagcacacatttttcttgcttcactgctgttctatattacacaggtttgttgttgtttttttaaaaaaagaaattaagcagtagttagtctctaaaaatacaatgtttcaggctaccacagtgaataaatagaaatgtaatcagggattaagaaaaaaacttatgcagcttttcaaagttgattgtttcaaaattggtgtttatttaaaataagtggtaatgtacttgaatgcactttttatgacaatgattcagtaatggtaattttactattaaagaaagtgaaaggtttagttttgttagcatggctcagcatgtagctgtcaggtgtttttcacctaagggcaaaagaaaatgatagtaataattgcagtagttgtattgtattgtatttttgcacgtgtggtaagcataggcttgaagaggtgggtaggcaggtacatgtacttcctaaatttggagataattatctttctgtaagttcgttatgcttgactgtttccatgttctcccaataatgattttatagttacttatcactttactcatggagaattaaaacgtaatgtttttcaactgtatctttctttaactggataatactgctatatgatatgcttactacagactgcattaattcacgaaacgaattctgttatgctgtaatttgaactctcctcaccacaacttattaaaaaggcaccaatagtttcccaaaaaaaaaaaaaaaaaaaaaaaaaaaaaaaaaaaaaaaaaaaaaaaaaaaaaagg

SEQ ID NO: 7978 - DNA, 939 bp, Homo sapiens
agacaacttcaacaagaagcggctgacagcctaaaaaaattaactacgttagagtctccactggaagatataaacgcctctgatatgcaatgaatatgtaaatgttttggaaatgaagacgttggttgccatggagacttaaaaacagatcaactgaaaatggatattctgattaagaagctaaaccagaagtttgataatcttatggcggagaaggaagctgtatcttcaaaatgtgtcaatttggctaaagagaatcaagtttttcaccaggagttatctatgaaaaaagcacaacaggaatgtgaaaaatttgaggaggataaaagatgttggaagaagaaatattaaatcttaagacacatatggaagacagtatggtagaacttagtaaactacaagaatataaatcagagctagatgaaagggcaatgcaggcagtagaaaaattagacgaaatacatttacagatcgaataagaaaatagcaatgatcagtatcagctctttatggagaaagagcaggtgaaatattttctcagcactcttcctgcaaggcgaggtcgagagtcaccttgtgttgaaaatcttactagtataggactcaacgaaaatatattccccaaatgcccgtaagaattcctacttcaagcctcagacttcaaataattgccagaactacttgactgaggttagttatatgaccgtttctctttagggtttcatttctctagcgtaattcttgtttataatttggtgaaatactgagttgttctgttgacttttgcatgtgaagtaaagatcataattagctgtgttaacacagaaaggaaatgggaactttacattttttaattccctggagctctcattttcaagagatatccatttgctaactttattcaataaatgtgactaaactgaaaaaaaaaaaaaaaaa

SEQ ID NO: 7979 - DNA, 480 bp, Homo sapiens
tttttttttttttttttaaccttaatgagccaatgcagtaaattcttcaaatgttctcagatttacaacaggtgacctctacaaaagaaagaaaccactgtcttatttattggttcagaaggtcagcttactacttaaacgggtctttttctgaaacctttggtactgggaagaactctctctccttgacaaatcttactccaaaagtcagggttttcgtctagcgggttttcttaaagtggggcatacctgtgagagggaggctcttggagggtcactgtacatttatacttccttcagcaaccaaagtcttaggcccctaaagcaactcacagaaaggctgtgaactcttccaaccttgctggccccagaaaggctcctttccctcctaacactttgtgaaatgactcgctcgctcccaagggcatcgtggagccacatctccaggtgagaccaaggtttccaggcctcagcatcctt

SEQ ID NO: 7980 - DNA, 3728 bp, Homo sapiens
agcggaattgagagggaaaagaagcaagccgctaacagctaccaagaagaggaggaagtgggagatgcgctgcttcctgtagaaagaacgttgattgaagacaaagctgggtggggactagtccctgggctgcagccgctgctacacatactcacaacgctgccgccgcgctccgtgggcaactcctactactgctgggctgggctgggctgggctgggctgcgccggagctcgcctgcacagatcagctccggagaggggaaaaccacgctcctcggaccaagcctcgggagctaagccagatctgccagtgagcctcaggctttaggaactgaagagtgtttctgaaagatctatccagcactccgatggccagcaacaacaccgccagcatagcacaagccaggaagctggtagagcagcttaagatggaagccaatatcgacaggataaaggtgtccaaggcagctgcagatttgatggcctactgtgaagcacatgccaaggaagaccccctcctgacccctgttccggcttcagaaaacccgtttagggagaagaagtttttctgtgccatcctttaagtctttgagaggggcctgaagagcctccgggctcctgggacattgatgtagagtttttagtgaagtgggcacctttctagtccacggcatttgaagagagcgaggagaaccattctggaaactctaggctatgcatgtttaaagatctggtcccctttatgagaatgcaagccgatccacatcctgacttaagagatctgattctgacgaactgcctggaggaggggaatatataaaaataaaattggtgtcacttcttttctgctatcccccagcccccccccccaaaatcctcatgtttctgcttcatattttgaaaaataacaattaaaacagacagctgtactgaggtaagatatgtgtgaccttcttggaatgaatattgtctttagaataccctttgataagctgagctgtcccgtgtagatgcaattcggtttaatggcattgatgtatagtcactgtgcctttctttttctttcttccttctcctctacccctccttccacccctccccattagagtagtgtggagataaggctggactggtctatcagattgaactccaagaatgatcacacaaaatgtttagggagatgttccccgtggtgtatcctcatggtaacaacgacaaaaaatgccggttgtctttgttctcttttcactattcctaacatgtgtacatgatagctttgattctgcaagtaaaagtaaatcctgtgttgtgactggtgctttcatatatttgtgacaatttttgagtaatattgcatgaaaatgtccctatgttacatccattcagaagttttgttgttttactctaaagctgggaaaggaaatgagagggaaaagaccccggagagggaagaaaatctcagtattttgaaaattgagattacttcagagccttagccacacctaaaatacctcctagttaatagtggtataaatgcctcttcaatacgttttccagaatccaaagcattttggtttatccaggacccagggcagcacagctgtcaccaagcaggagagttaaggattcaccatgagctgggaaatgcttttgccatgagtatgagcaaattccctctttccctgaatcatggacattctagattaaaagaacattttttgtgctcttaacaagaaaaccatggccctcctttgttcaagtatcacaagaaataaacccacagctccagagaaggtgaccattctcagaactccagctattcactctccagggagaaggacctcaaatcgccactctttgggcggcaggtgcggtccccacggccggctctacgaggaagagttctggctcttttgtccactgagatggtcttggtttttcacttaacaaattttttaatggaatctttgtttttgttctccatcttgtttgttagagtctctcggcctttatttacaaattccttgcaactagagcgctccttccccaagatatggtagtgagagtaatttttcattgtagctgtagtctccatcagtaacagcaggccctggaagacttgatcacctttttctgtgtcattttcagtcaaagagggcctctcttacatcttgtttgctttcaaatccccaaatatcatctccatctcccaattaattttattctctctttcctctgtattcgctttctcctgtttttttttttaaaaaaagcatgaaaaaggaagagaaaaagtttgatatgccaaggacagattttgaaacagacttggtaaatgttttccttagctccttcatgggcatgctggtgaaagaataaatacatccaattaaagctcatgctggggtcggggagaagaggatactgaaacatttgtgaaatgtatgaatgcacttctgtaaccagatacttctgttcttctgttcaaattgtggggtttttgttacagttaggacgcccatgaagatttaggggtgaaaaaaacagcagagtatttattaaactacagcattgtacaattagcttagtaacactatggaataagctaaaacatatcacagtttttacatgggccaaaacatgaattgagtatgtggtcacatgaaaacacggatgaatgaataaaacactctttggtggtgactgaggcatcattagaaggcccagacgatttccactattcacagcatttccttttctcagaaggactctttatatttccatgtaaatctagatctttggagcaattaagatggaattacaatttctagggagcattttaaggaaaatgttttggctttttcataattttatgtcttacagtatggaattataatacgaaaatctttatatgagttttggcttcttggtatttgtacttattcaggggaaaaagtctttcgattacttatgcctctatagagcttaatttcttgagaaattcaacagtcattttcaccagcataattttatcttaaggaataactaataggaaaagtcagcttaattatttaaggccctagtttctacatataatatattcgatagaaatgaaaatctgccgtggaattaactaataagtagtaacaataaacttcatatttagaatgcaaagtctataaagaataattttacatgatcctcaatatcaactccagtttaaaaagtgttatttttaaaacatttgaaaccaagtactgtttaatttcaatcagaagatgcaaataaatactttgatctatgtttgattttgctaataatatttgaaggagattgcctaccaaggacaaaacaataaatttaaaaatcaaacgatttctccatacgctcatagtcacatatggaattttgagaaaataaagcatgctgtctttaggaatttttatacttctttgtctttcttccttaatatttgcttctagctgctcttggcaatgatgaattgttatgtatgcattaatgttttgcagcccaaaagttgttcacatttttcctatataagatctgtggagtgtgtgtttcaaagagagaactacagaaatgttaaagcaggaaaacctgaatgtgatgtgcacattttcatcccacatggacaatgtatgtgttttaataaatggaattttcagattcaaaaaaaaaaaaaaaaaaaaaattatcgaatcggacgc

SEQ ID NO: 7981 - DNA, 479 bp, Homo sapiens
tttttttttttcctttttttcttttaatgataaacgccccattcacattggcgggctgcagatcggtcttggcgctgtatactcccaggtccagggcactgggatggtgctgggtgctggcctgcagggcactgtccagatcaggatctgtctggatttttggccagaccttttggttaggtcataaggcgattcaatggtcctagcaagacttcctttcatctatatcatctcctgccacttgaacttcaaggtctatctgtagtaagttaccactgcccatgggtagctccaggctcaggcggttctgggtcagctgcaggatcactgctgcaaggagccagggctctggatttccttcaggactcctgcaggccgggtgggaacagaggcccactgaggcccttggggcggctagccacagcccttccaccccctttctccgtgggtgcccatggatctgtaccccgcctcagggc

SEQ ID NO: 7982 - DNA, 1634 bp, Homo sapiens
tctaatcgttattgattagaagcatgactcctgaaggaaagggaaataaatctcaattcatactaacttgcaacaaaacacttttaccatataaataagtatatgatttatttttaacccaaaaaatgtataaaataagtgtgtcctttactgtcaatttatcgagaagatctataatatatagactacatatatataatatatacaacatagccaaatgtatgaaaacttgacaatgtataatttggaattcacatgctacctatgtagacaggtatgaaattaagttataattttcatgagacattttcatcactgttgacacagtttcaaggcattccatcatgttattttgactctttttcttttttttttctttaaaaaatatatttttaactggaccggggccccactataatatcacttaagagagtcagggcaaagtttttgcatttatgaagatgtgttcatgtaagggtgattgtaatggagttcattggtaatagcggcaaaagtacagtaacgaagtattgaaaagaaaattttggagacattggagcatattatatatagcttgtggaaagacataaggctacagatggaatggaacattcctgttttcttgaagaaattcacatacacatagctgacctgactagtacttcagctcttccacagccttctataaaggttctttcttctgcaaagaaaacaaaacaaaacaaaacaaaacaaaaaaaaacaaaaaaagcgcaaaaaacaaaaaaacaaaaaaaagcaaagtaaaatttaaaaatacagaaaacaaacaacaaaaaagaattcaaccataaatagtgactattattttcagtgtgtccttcatgtgaaagctattaaggaccaaatatactactgttcataagaagaaattactttctaaacagtaactgaaaatacttagagttaaacttgctgtggattttgtcttggcagttgtcatcttacattatttgtcaaaggaaatgtgtttggcagttaaaaatctttccttagatttagtggtggactttaacctcttaaataaatgttagtatatcagattgtgtccttgaaaaatattttacttgtatgaatcatgacaacgtctaaatctttactattcttctggcaaaagcatcagtaagaaagaaggcgaaaaagagaagtatagcctttatgtcagaaaaacattctttttagctgcttactttctcatgaaaagtaaagatgtttacagtgtatgccaagttttaagtttctgtataacaacaggtagaggttctaatcatattgaaaattgtgttataatggtctgagccatgttgctaggaaacaataggttccaattttgtattcctgctctcctgtgctgaaaagtgactggatactgtacaggttcatgttctctggctgcagttaaatggtcttttgcattttgctctggctttcaggccagaagcatgcatttttctacaagagcatcacaacaacatgctgtaaatatttaaagttaaacattatgtgttgatatttgaaagaaaagtactttgaatatttcatttttaaaaaataaaattgccaatgaaaaaaaaaaaaaaaataaaataataaaa

SEQ ID NO: 7983 - DNA, 497 bp, Homo sapiens
  misc_feature (57)..(71): n is a, c, g, or t
tttcttaccagttttttttcttctttttaattaccatgtttaacaaaagacaaaacnnnnnnnnnnnnnnntgtggtattgactagactccaaacatattaaataaatcacataggctgggttgggtttcacacgagaactagtttggagatggttattcactgttctcccaagaatataaaaatgtccagaggagacagtgagataaggagatacatggcttcagctctgtgggaatttctaaggctttaaaattcactccagaatcctgcaaaattccttgatgttgagcttggctgctgatgccttcttttgtctagatcctctgaagccatgcactgagactccagaaatttactctagtctttctttctacttgtgaccaagaggaaagttgggcaaaggggttgtattggtcagataggctaattgttataagaaatgacctccaaatttcaatggtttgaccccatgcaaatattgttcttgtcaaggtc

SEQ ID NO: 7984 - DNA, 1076 bp, Homo sapiens
ggccttctctcctgtacaccccccctcagttgcaccaccattttctccaccactcttgtgccccactccccccaagtttttccaacacacactgcttcccctcactctgacggccccctctctttatactctcctatggtcctcttcgtcacacgccgtgtcagacgtctccccccggcttttttgcgcccccctctcttctctcttcctcgtcttctcttttttccttgctttttctttctcctctctctctctgctctttctcttcgttttattttttctgttttttttgttgtttgtgttttgtttttttaaagaaggaagaggtttatttggccaggagcattggcagacttgcatcttaatagctgagatccctgaaaaagaaattcttggcctttttaaaggcttacaactctaaggggtccacgtgaaagggtcatgatatctcaagcaagcggggaacgtgactgggggctacacgcatcagctaacagagcagaaagttttgcaatgctttttcatacaatgtctggaatttacagataacacaagtagtttaggtcaggggttgatattattattattgttacttttttttaactaccagggccgggtggtgtcgccaaggtcttctggctatttatcttacttctgttttgttttgttttctaactttttgctttctctctttcctcctgtcttgtaaactaggcaaggtggggggaggagggcagcaggagtagtagtggtctccttcttactgtgggactggcccctttggtttagggtatcaccaaaggcagtgtctaggccagcccagtgtctctgcccagcaaacctccatctgctgtgcactcacagccaggccatgctggtgtttggtacaggttgggtgcatgaaggatgaaggttttggcctgtctggggcttttgcctgcctttcttcctttctttccatccttccttatccttcctccctccctccctctctgtttgtctctttgtttgctttgtttcttctttggagacagagtctcgctctatcacccaggctggagtgcagtggcaccatc

SEQ ID NO: 7985 - DNA, 844 bp, Homo sapiens
  misc_feature (265)..(265): n is a, c, g, or t
  misc_feature (272)..(272): n is a, c, g, or t
  misc_feature (280)..(280): n is a, c, g, or t
  misc_feature (800)..(800): n is a, c, g, or t
  misc_feature (831)..(831): n is a, c, g, or t
tggtggagatggggtctcactgttgcccaagctggtcaggaactgctggtctcaagtgatcctcccaccttggcctcccaaagtgttgggattacaagcgtgaccactgggctctgcttattatctctattttagaggcaaggaaatagaagcttagatattagcttgagcaaggtcacaaaggagtgaatcgttcctaggatttcagtctaggtatgcttgaatcccaagtctgtattctaacactgccttatcctgtcttatnatttatnctttcgtncacttagcaatgactgtgcacctactatgtaccaggtactgtgttaggccctcctcatccaaggatgcacaagatcttctggcctagatggccccacggtacagatcaagtgggtgcaggactctcaggactaaccctgtgaccaataccctatgccctgagcacccaagataacctgacaaaatagataaaagccaagcagataaagactgagcccagtaatgacttttaggaaggtaagagcacctcattcccacaagtatgtttccttttaaagctccttcattcagggaaggagtactaaactgtgttgttcaagtcacccgatgacatccaaaacacagaggcaccacttgcaagttcttgtggaagatggcggtcccttggatgatggaaatattgcgtttggacataagaggatcttggttcacgtctgagctctaccacttcctggctgagaggctttggatgattcacttaccctctctgaacgttagacacctcacttgttaaagagaancaataatactccatttctcactttgctcacnatcgtgccgaatt

SEQ ID NO: 7986 - DNA, 6728 bp, Homo sapiens
  misc_feature (3806)..(3829): n is a, c, g, or t
  misc_feature (4251)..(4278): n is a, c, g, or t
  misc_feature (4404)..(4429): n is a, c, g, or t
ctcacacttttgctctcttgcagtcagttgctttgctggcttctgcaggcttttaaggtctcgcggcgtagaaatgcctggcccccacccccttcctcggtctcccctttcaattcagatgtgctgatgtgcagaccggattcatcttctcggagctgcggcggcggctttgggctcaggcggcggcggctcgcgctcggccgcggagtcctggcagcagcggggacgcggcgcgggagtccgagctctggtggcagctgagcccgcggggcgccgctcgccgagccgcggccgcgggaagttcggcagccagaaggacgacctggcaggctgcgagcgccagcgccgccagagccgagtttgcctgcgccctccccgcctccgagtgcagagttccttacctgccctccgcccacccgtgggcccctagccaacttctccctgcgactgggggtaacaggcagtgcttgccctctctactgtcccggcggcatccacatgtttccggacacctgagcaccccggtcccgccgaggagcctccgggtggggagaagagcaccggtgcccctagccccgcacatcagcgcggaccgcggctgcctaacctctgggtcccgtcccctccttttcctccgggggaggaggatggggttgggaacgctttccccgaggatgctcgtgtggctggtggcctcggggattgttttctacggggagctatgggtctgcgctggcctcgattatgattacacttttgatgggaacgaagaggataaaacagagactatagattacaaggacccgtgtaaagccgctgtattttggggcgatattgccttagatgatgaagacttaaatatctttcaaatagataggacaattgaccttacgcagaacccctttggaaaccttggacataccacaggtggacttggagaccatgctatgtcaaagaagcgaggggccctctaccaacttatagacaggataagaagaattggctttggcttggagcaaaacaacacagttaagggaaaagtacctctacaattctcagggcaaaatgagaaaaatcgagttcccagagccgctacatcaagaacggaaagaatatggcctggaggcgttattccttatgttataggaggaaacttcactggcagccagagagccatgttcaagcaggccatgaggcactgggaaaagcacacatgtgtgactttcatagaaagaagtgatgaagagagttacattgtattcacctataggccttgtggatgctgctcctatgtaggtcggcgaggaaatggacctcaggcaatctctatcggcaagaactgtgataaatttgggattgttgttcatgaattgggtcatgtgataggcttttggcatgaacacacaagaccagatcgagataaccacgtaactatcataagagaaaacatccagccaggtcaagagtacaattttctgaagatggagcctggagaagtaaactcacttggagaaagatatgatttcgacagtatcatgcactatgccaggaacaccttctcaagggggatgtttctggataccattctcccctcccgtgatgataatggcatacgtcctgcaattggtcagcgaacccgtctaagcaaaggagatatcgcacaggcaagaaagctgtatagatgtccagcatgtggagaaactctacaagaatccaatggcaacctttcctctccaggatttcccaatggctacccttcttacacacactgcatctggagagtttctgtgaccccaggggagaagattgttttaaattttacaacgatggatctatacaagagtagtttgtgctggtatgactatattgaagtaagagacgggtactggagaaaatcacctctccttggtagattctgtggggacaaattgcctgaagttcttacttctacagacagcagaatgtggattgagtttcgtagcagcagtaattgggtaggaaaaggctttgcagctgtctatgaagcgatctgtggaggtgagatacgtaaaaatgaaggacagattcagtctcccaattatcctgatgactatcgcccgatgaaagaatgtgtgtggaaaataacagtgtctgagagctaccacgtcgggctgacctttcagtcctttgagattgaaagacatgacaattgtgcttatgactacctggaagttagagatggaaccagtgaaaatagccctttgatagggcgtttctgtggttatgacaaacctgaagacataagatctacctccaatactttgtggatgaagtttgtttctgacggaactgtgaacaaagcagggtttgctgctaacttttttaaagaggaagatgagtgtgccaaacctgaccgtggaggctgtgagcagcgatgtctgaacactctgggcagttaccagtgtgcctgtgagcctggctatgagctgggcccagacagaaggagctgtgaagctgcttgtggtggacttcttaccaaacttaacggcaccataaccacccctggctggcccaaggagtaccctcctaataagaactgtgtgtggcaagtggttgcaccaacccagtacagaatttctgtgaagtttgagttttttgaattggaaggcaatgaagtttgcaaatatgattatgtggagatctggagtggtctttcctctgagtctaaactgcatggcaaattctgtggcgctgaagtgcctgaagtgatcacatcccagttcaacaatatgagaattgaattcaaatctgacaatactgtatccaagaagggcttcaaagcacattttttctcagacaaagatgaatgctctaaggataatggtggatgtcagcacgaatgtgtcaacacgatggggagctacatgtgtcaatgccgtaatggatttgtgctacatgacaataaacatgattgcaaggaagctgagtgtgaacagaagatccacagtccaagtggcctcatcaccagtcccaactggccagacaagtacccaagcaggaaagaatgcacttgggaaatcagcgccactcctggccaccgaatcaaattagcctttagtgaatttgagattgagcagcatcaagaatgtgcttatgaccacttagaagtatttgatggagaaacagaaaagtcaccgattcttggacgactatgtggcaacaagataccagatccccttgtggctactggaaataaaatgtttgttcggtttgtttctgatgcatctgttcaaagaaaaggctttcaagccacacattctacagagtgtggcggacgattgaaagcagaatcaaaaccaagagatctgtactcacatgctcagtttggtgataacaactacccaggacaggttgactgtgaatggctattagtatcagaacggggctctcgacttgaattatccttccagacatttgaagtggaggaagaagcagactgtggctatgactatgtggagctctttgatggtcttgattcaacagctgtggggcttggtcgattctgtggatccgggccaccagaagagatttattcaattggagattcagttttaattcatttccacactgatgacacaatcaacaagaagggatttcatataagatacaaaagcataagatatccagataccacacataccaaaaaataacaccaaaacctctgtcagaacacaaaggaatgtgcataatggagagaagacatattttttttaaaactgaagatattggcacaaatgttttatacaaagagtttgaacaaaaaatcnnnnnnnnnnnnnnnnnnnnnnnntactaaaagagaagtttccagcaaaaccctcatcagcattacaaggatatttgaactccatgcttgatggtattaataaagctggtgaaagggcatcatatacttcaaggaagactctacaagcttttgttcacagcttgaaatagatgcctcacaattcagacagtttaattcaggaactgtgaccctgaagtgttctttttgacaatttgtcaagatttagggacataaaatgatcttgcaggtcgtaaactggaaaacagtattttggttgtcttaggataattgctgactttgtatcttggatacagtgtaaaccagatccatataaggtgaatgtgaaatgggagtcttctgagggtgatttgtactttccatgtgtatgtgtgtgtctggtgtttggaaactgggatatttcagcnnnnnnnnnnnnnnnnnnnnnnnnnnnnaacctctgaaacacaaatgatcttgagaccactttagtgtacttacatttagatgagtttgaaatctcaatggtgtctaattattgcagttaaattctagacatcagttctttaagtctcagaaannnnnnnnnnnnnnnnnnnnnnnnnntcttttttttggaagtgctgccttttcacaccaaatccaagaagcctgtgatgtcttatgaaccttatgagaaaactccgaagaggtgtgagcaggattcttctgaatgactgtctggatggttcattactcaagttactgctgctgctattgtctttcctttgttgtcgatctgttattgttgtattattattgttgatgttgtcatggttaatctattttttaaaattgaaatgaagcagaagtaggccttgtgagaactgaaaggtctctttcatttttctcttcctgggattcattttttcaaaacacaatgctggaaaaaaaagatttgtttctgaaagacttcttatggtgctattccataaactttttttcaaacaagtttttgacctttgagccaacccacccgtagactacgaatgtctccctatggctggtagcatttgaagactaaagacttgtcaaatatatcaagagtatatcattgcaagggcagcacttgtcctgtggaacaactacttataatgccttagaattcctgcacatgatcaaacagatcctcctaaaacacaccttttgaaatgttgaacataatagtgtatgttaattaacagctctatgaagaaaatccatttccatgactgaagcattggatataaatatggtgtcctgctttttttgtagaaaatgtaatttgaggatgaattttctgctttaaaggcatgtgtgtttttaaaattaatgaatgtagatgtgtgattgtctgagtgagtgaaactacaagaggtaaaaaataatgggtggttgaaaagttaaaatgtatgtgccaagttctactagaattccatttgaaatagcaccttccttaggtttcatggacaaataatgggaacttctaattttgatcaatcccattaaaaaaaggctctttcctttagagaaactctattttgatgtcaatatagattactgtatgaagtagctttgtgtctgttacctgtccatgagcatacaacattgaatacaattgggtgtattctttcagttttacacaattaaagtatacacacagatgtagcttatctgtttttttcttaaattgttgccctgaaaaaatttcttgcatatgaattgtaaaatgtaaatacatttttataaccaatgttttgatcttattgaatgttactttgaaaatgtataactattgcctgcaatgtagatgagccttttagtagagctgatttattccagtaacttcttccatattttctcactaatctcccgttagccaaaatatgccagaaatgggaaagagaggagaaaaagtcattaacattaacacctatactgttctatactactcctacccgtgtgctaggaatgtgcactagctctttttaaattccatgctacactttgaggactgtcatcatgttctcgttttgtagttcagaaagtgaggctcaaagaatttatgtaaccttcccagagtcacagtgtaaagttagatgttgaaacccagtttatcttatacaaatgagcctctgcttgttctacaaaggtagtagaatcaatctcgacctatataaatagtagattttttatggtgaaactttcccacataaagtaaattttaggggtgaattagagtaaaacttacaggataagcattttgctctttttaagaacagcatgaaatttagaatatcaatgatagctatctttaagaatcagaattagtactagaaatttaaaaaaccctatagtttggagttagtatgagccttttgtgaaaataaatatattaaattattttgcctgatgtggtaggggaaatgtattgctctatattaagaaatattctggatattctgattgacatcttattaggccatagtgagctatgctctgcacaactgagaaattaggtatttagaaggcatgtagagatgttgtcataactaggtcttcaacgtgaaaattaatttttattgtatcatgtcaagtatcagtttaccacatattatttttatattaattcaacatttgccttaagtgtgttgttaaatgaaagtacagacagcttcattgttgtattgttaataattgttacttactgctccaggcattttactaaattaattttttaaattattttccaccctacatcagtatattggttgtgctttatatttgccaaagtcctaactgactatacatagaaaaaaaaaaaaaacactgttctcacttgattttattaaattatttttaaaagtcaaaaaaaaaaaaaaaaaaa

SEQ ID NO: 7987 - DNA, 1441 bp, Homo sapiens
ggaaagttgtattatttcctgcactgggttacccgtgtgtgttatcgtttaaactgtattcacataatgtcatttgccttgctcacttgtaaccccttcctcaggtccaagagaatgggaggagggtcatgttgaagtgtagccactggaactttcttgcatttatggagttgctttttctttccccaaggaaactgatgtttgcctgtccgctttatctttgtagtacatgaacagttcagccttagactatgtaactgttttctcatccttagctgaaaatgaggggcctactgtattgcgagactgttcaggggtaggggtggagggggtggtcccttaatggcccctgaagatgttggatgtgtttctcaaaagctgctttgtctctttcctgagtttaatagtgaaactactaaacattaatagatttgcacagccacaaagaatgagagttgataataccgaagaagtgatgcaaaaacaaaaaatcacattactgatcattgatagtattacaaataaatgtctcttcctttctcttcctcccttcctccccctgccttcctcttaacctatgtgctcatccttgctacttgaggctgttatttccctccgagtatttaaggagcccaaacaccttggtcttcctgggtgggggcataattaagggaagggagtgtataaggaaggaaacctcataccctccattcccatccctggatatattgccttttcagcagcctcgggttcagtgtgcttggggtcaggagtgccaggttcccaagagcagcgtaaaacatccctgtaccccttgacagttataagcatttctgcgttaaacttgaagattccagagattccccacgacctaatgatctaagaatgcagattggattctttgatgttcaaatttctcatttacttatgaaaatccctaattatatagttttatataatgtgtatacagagtaggattgttgatgaaattgagcggttggaacaccctcatggaacactggcaacatggaatgtagagagctgatgtcttccccctcatagaggccattggcttcctttgtataaggagagggagaagtgattctggaaggagaagttggtatgtctagcttcattgcggcccctcgggctacccagcaagaggattctgcatcaaggaactggacgagccgctacccaaactgccaccatctttactctttacaaaatggacccatcgagaatgttgaaaagcttggaagtatcacttttgaaaaaaaaaaaaattattttgcattcagcatggactcgaccaggcatctatggagattatttttttgcttcattttataaagttgtatttagaaaagtcttaagtattgtgctttgtaaagaagatgattaaaatgaaattttgtgagaataaaaaaaaaaaaaaaaa

SEQ ID NO: 7988 - DNA, 3452 bp, Homo sapiens
  misc_feature (391)..(407): n is a, c, g, or t
tatcgaattccgggtggagggacctggcaaagcgccaggccccgcgtgggctcccggcgagcggttgatggcgagggggcgcggcgcgggctctgtagcccgagttcccgacgctggaggcccggcccgcctcagccgcattgtcccgggccgcgcgcaccggccctgagctgcgccgccgcagcacccgcccgccgcccgcggggccatgcggagagccgccgggatggaggacttggctccgcggaggaagaggagtcctggtacgaccagcaggacctggagcaggacttgcacctagctgcggagctggggaagactctgctggagaggaacaaggagctggaggggtccctgcagcagatgtactccaccaatgaggaacaggtgnnnnnnnnnnnnnnnnnaaccaagcagctggacacgctgcggcacgtgaacgagcagcacgccaaagtctatgagcagctggacctgacagcccgggacctggagctgaccaaccacaggctggtgctggagagtaaggctgcccagcagaagatccatgggctgacggagaccattgagcgcctccaggctcaggtggaggagctgcaggcccaggtggagcaactgagaggcctggaacagctgcgagtgctccgggagaagcgggaacgcaggcgtaccatccacaccttcccctgcctcaaggagctgtgcaccagcccccggtgcaaggatgctttccgcctacacagttcctccctggagctgcccgcggcccctggagcaggagaacgagcggctgcagaccctggtgggggcgctgcgctcccaggtgagccaggagcggcagcgcaaggagcgggcggagcgcgagtacaccgcggtgctgcaggagtactcggagctggagcgccagctgtgcgagatggaggcctgtcgcctgcgtgtgcaggagctggaggccgagctgctggagctgcagcagatgaagcaggccaagacctacctactgggtccggtacgaccacctggccgaggccctgctcgcacccctcacgcaggcccctgaggccgacgatccccagcccggccgcggggacgacttgggcgcccaggacggggtctcctcaccggcagcctctccaggccacgtggtgcgcaagagctgcagcgacactgcgctcaacgccatcgtggccaaagacccagccagccggcacgcgggcaacctcacactgcacgccaacagcgctgcgcaagcggggcatgtccatcctgcgggaggtggacgagcagtaccacgcgctgctggagaagtacgaggagctgctgagcaagtgccggcagcacggggccggagtgcggcacgccggcgtgcagacctcgcgccccatctcccgggacagctcgtggagggacctgcgcgggggtgaggagggccagggtgaggtcaaggcaggagagaagagcctgagccagcacgtggaggccgtggacaagcggctggagcagagccagcccgagtacaaggcgctcttcaaagagatcttctccaggatccagaagaccaaggctgacatcaacgccaccaaagtcaagacgcacagcagcaagtgacccttctccggcctgcagcctcccccagggtggaagccgtggggtccctcaggcctgggcggtgcagcttccagagagcgagcgccctttagcggcctgccaccacagcacgcggcctcctgatccggaagcacgcagcatgttccctgctgagcggaggcagcccacctgtcctgcctcccaggagcccttggccacctcgcgccagcccaaaggcgcagctctgagttcaaagccaaatgtccccactaccccagggatcccccagctcccccagcccctggcttcctgaccctgcgcctcaccctcagactggtgaccaggcttctgaaagccattctggatcagttgggctttttttttttttggttaagtttgttttttctaagagatttgcaatcaaggtctccttgaccccttgccacaactggaaacacttgaaaggggaccccagggccagctgtttcaggggtttcctggaccacccactgcttctccccaaccctgatgcgctgacattcccttagcaccagctgtcccacctccagggtcctgaccaggtcagagatgtcccctgccatgcagagcaggaagcctcagctgggcctggagtgtccctgctccagccctgccagggacaggtttctccctggatactcttggcccaccgcagatctgtagccagtcagaggaggaggagaaggagcccctcagcagagtggtgcagtttcgctcagagcttgtctccttggcttccaaccccagaaatgacctgctgggccttagctttccaggggccggggcagtggggagcccccatcccttcacaccgccaccaactaaccaagcttggcctctgactcccgtctctgtgcttgcccccatctcagggaccatgatgtctcagtcactccacgctccccacaggccaaccctggcacaggtcatgtctgcagcccccagaatcttctggacatgcaccaccagccggtggtcccaatgtccacccctgcctccccttcactggggactggggttttcgccccatgctgcatcgtgttgtattgggatggggctgaggaacatgctccctccctccctcccataaaatgcctgctcttcacctcccacctttgtggggggcttttgaggacccagctgcgtcaggagttttgcttcaagatgtcagaaagtcaagttcagctaagagacacccaggtccccagcttgccctgagcagcccttcagggcttctggttccttctgccgcccttcctgagaccttagaaaccagaagagccatacagtcagtggaaggcgggggggccctggcctctgcaccgggatcccagtgggaaccttcatgccttatttatttctaatgggtaaaggggttttcttaccaagcatccctgacctcctggagacaccacctgctttccgggcggcactgtgatgggagctggtggcgactgagtccttctgtacgtgcaactgggaaacttttgtcctttgaggctaggcagctccctgccctccgtgtgtgtctgttatctgggggagaggagtgtggaagggttgggggaagagctccagcctgtctgctccccagctctgtagtggcagaccagcgtcacctttgaagtatacgtgagagaaatatatttacaaatgctttattctcttctttaataaaaaatgcaccagtattctaaaagcaaaaaaaaaaaaaaaaaaaaatatccgggggcagtaggtcccgttgtaaggcctaaggggttaagggggcggtaaggagaaaggggttggaggcctggggaggcacccgaagcgaaatttgaccg

SEQ ID NO: 7989 - DNA, 5284 bp, Homo sapiens
  misc_feature (692)..(706): n is a, c, g, or t
gggcagagatgcctccagctgggctttgagggtgtcagtcttccctcaaataggaaagatgaggggcaggggaggatattggggacaagcctctgctcagccctgggtcctcttggaaccgggcttggagccggaggtggggagggtgtccaagctgagctcctggattcccatctgccgaactgcacccagaaccaggagtggggtgcgggcccatcctctggccaggatcctgggctcccttggccacaaagcaggacaggggaccagagatcccccaactcaggagacgtgaagctggcagctgggccgctggcctagaaatggcctcaaatggaagctgccacccgatcctggtggaggctttgagctaggctagagatcaggactccagggttcagtgcgcacgtgctgcccctgcactagggccgaagcaatgcgggtgctggcgaccgacgcaaggaggtgacgcacaggggacttaaggagcggaccgccgcgggaggacgcgcccagctcagggggactccctctgcgccccccacgctgggtctccggcccacgcgtggcccggctggtctgcggagctagcgccagggccgccagagggcgcccggggcggaggatggggcgggagccggggaagcccgggaggtggtggccgagtgggcgccgcccctctgggtctgcgnnnnnnnnnnnnnnntcggctgcgtgggccggggaatccggattccgggggttcaacgcccaggggttccatgagcccctactgttctcggacgcccggccggccccgacgcactcgtcctagcacccctcccctgtccggtcctccggcccctccgccgtcgcccctccggggtccagccgggcggggctgctccagggtcgcggctggcgcgggtccccgggccctggccctccggtgccccgggccaaggagagaaaacttgagcatccacgcacaggggtggggagcaggatcccactctgagggtgcactgccccgccctctccgggtctgcctcggccccgcccgggccccaggccccgccccctcccctcggccggcccgagagctccgggggccgctgcagccgcccaagcgcccgccatgcgcgctgcccgcgccgcgccgctgctccagctgctgctcctgctggggccgtggctggaggctgcgggcgttgcggagtcgccgctgcccgccgtggtccttgccatcctggcccgcaatgccgaacactcgctgccccactacctgggcgctctggagcggctggactacccccgggccaggatggccctctggtgagagacccgggcattggcaccgagtgggcacctaacccccagcttcgcagatggcccccgcccccggcggccctgtctgctcgctccctgcccagacaccacctagacaggcccctcccctcacagacggccctgccagcccgagccgccagagaggaccccgagccccctgctgggagacgacagacctctgaggccacaggccgacgcgggacacccacccctccttctggtcccctactccttcctcttggggccttccctgggtgtaggttgggcccagccagcccttttcaccccagccttcagggcccagctcaaccccagtgggacctgtggttggctggatttgaagaggagcagacaggaacctctgaagtccactggggcccaacgtggcagggatcgaccacgctggaggcttccgggcacaggttgggggtgccatcagcactgggctccgggctgtgcaggggagtcagaccggcccccccaccgcccccgtgctggggccagctctcttggtagatcttggtagaggggcgggatcctgtcagccaagggcagtcccccttcctggagcctctcccctctggcatctctgtacccccagggcactgggatcgaaggccacaacccctggtctgtagacaccagaacagggaggagtccctggctgaggttgggggtaaactgagaaaaatgacaagccaccctctacaacacaccacagttgggctggggggggtggagccctggcctggggaggccgcccacaattaccacagtttgggagtttgttagttcccacccctgtaagacttgacacgtagtcttcatttctggggaattggcttaaaggggcagcatcacccaaaacctgggcacttggctaaacccccacctctgttatgggggccccttccccaggagaggggaggctgtgccccatgacagcagagcttggacccatctgcattcttagggacgcttagagcatggtttggtccttattacaacctgggggtggaggaaagcagcagctcttctgtctagtccccattcagagagggacaggggctggcctgtggtcacacagccacaggtcacataggtaggtatctgcccacctaacgaaggtaaccagggaatgcaccaggtgtgatccttaaagtcgaggtacttttcatctttcaaaatgcattcgttggccaggcgtggtggctcacgcctgtaatttcagcactttgggaggccgaagtgggcagatcacctgaggtgaggagttcaagaccagcctggctaacatggtgaaaccccatctctactaaacacacaaaaattagccgggcatggtggtgcacacctgtaatcccaggtactcgggaggctgaggcaggagaatcacttgaacccgggaggcggaggttgcagtgagtcgagatcataccactgcactacagcctgggcgacagagcaagattccatctcaaaaaaaatgcattcttcttctcttatcttcgtccatgacataagcaggacagcttaagttatagagggaggacgtgaagcccagagaaagatgggacttgcctgaggtcacacagcaggtcacagaactgtggtggggacctggctgtgctgcctccagcctctctgctgtagcacacctacccttcactgttccaaggagagctcgacctcaaaggtgttagtgctttggggtcaaggctgccttggggttcaatcctgtggctgtgccccctcagccttttttcttcccgtccccaggtgtgccacggaccacaatgtggacaacaccacagagatgctgcaggagtggctggcggctgtgggcgatgactatgctgctgtggtctggaggcctgagggcgagcccaggttctacccagatgaagagggtcccaagcactggaccaaagaaaggcaccagtttctgatggagctgaagcaggaagccctcacctttgccaggaactggggggccgactatatcctgtttgcagacacagacaacattctgaccaacaatcagactctgcggcttctcatggggcaggggcttccagtggtggccccaatgctggactcccagacctactactccaacttctggtgtgggatcaccccccagggctactaccgccgcacagccgagtacttccccaccaagaaccgccagcgccggggctgcttccgtgtccccatggtccactccaccttccttgcatccctgcgggctgaaggggcagaccagcttgctttctacccgccacatcccaactacacttggcctttcgacgacatcatcgtcttcgcctatgcctgccaggctgctggggtctccgtccacgtgtgcaatgagcaccgttatgggtacatgaatgtgccggtgaaatcccaccaggggctggaagacgagagggtcaacttcatccacctgatcttagaagcactagtggacggcccccgcatgcaggcctcagctcatgtgactcggccctctaagaggcccagcaagatagggtttgacgaggtctttgtcatcagcctggctcgcaggcctgaccgtcgggaacgcatgctcgcctcgctctgggagatggagatctctgggagggtggtggacgctgtggatggctggatgctcaacagcagtgccatcaggaacctcggcgtagacctgctcccgggctaccaggacccttactcgggccgcactctgaccaagggcgaggtgggctgcttcctcagccattactccatctgggaagaggtggttgccaggggcctggcccgggtcctggtgtttgaggatgacgtgcgctttgagagcaacttcagggggcggctggagcggctgatggaggatgtggaggcagagaaactgtcttgggacctgatctacctcggacggaagcaggtgaaccctgagaaggagacggccgtggaggggctgccgggcctggtggtggctgggtactcctactggacgctggcctatgccctgcgtctggcgggtgcccgcaagctgctggcctcacagcctctgcgccgcatgctgcccgtggacgagttcctgcccatcatgttcgaccagcaccccaacgagcagtacaaggcacacttctggccacgggacctggtggccttctccgcccagcccctgctcgctgcccctacccactatgccggggacgccgagtggctcagtgacacggagacatcctctccatgggatgatgacagcggccgcctcatcagctggagcggctcccaaaagaccctgcgcagcccccgcctggacctgactggcagcagcgggcacagcctccaaccccagccccgagatgagctctaggtccaggtgatgactgcaaagcagtgtccaggagcaggccactactgcccagagagcagaggaggaggttgttggcagggactgcagatcctgtcagacctggccaccaccttgggcatggccactctgccctctggacctgtctttcatcgggagaaaccactcagagatggatcccattccctaaaggtctcacagcaaaggagcaggactcccaggcccctgtaccctgcctggcctgattcagggccttgtggcccccagcttctgtttcaagctgggcagaccccaggatcccttccctccctaaggactcagctgaggggcccctctgcccccttctacctccacctcagcaccctcccccagcttgatgtttgggtctccccagcaccctcctccctggccggtgcaaagtacagggaggtaaagcaggacccttgcagacatgttgcccagcacacagtaggccctcaataaaagccatttgcactttaaaaaaaaaaaaaaaaaaaaaaaaaaaaaaaaaaaaaaatagagaagggattcactggccgacgttttaccgtcgtgctgggccctgcc

SEQ ID NO: 7990 - DNA, 1505 bp, Homo sapiens
gggactctaggatagtaagtgggttgtggaatcggcggagggggagcataagagggggagggccgcggtaagagaggaacacagggtgatggattgtggtttataagcgtgattatgggggggatagaataattgtgagtcgcaaaataaggggatcttaggtagcaagaccctttgagtaggtgaaaagagtggaaaaagtatgtttaggggcgtgtatttgggaaacaccattcttgagggaaaagagggccaatccctgttccttgcccctaaaaatatatccctttcctgggggttccgggagaaagattcccactgtgggaagacacccgtgaggaggggccccttccttgtaaaattgggatgtggggcttaaggtaacacagggtttcacaaaaatggaaaaatttcccaggtttgttttgccaggggagggccccaatgtaccattgggctgtctttgcccattattgattcggttcatgcagaataattgtgtgcccaagaagatgctgcagctggttggtgtcactgccatgtttattgcaagcaaatatgaagaaatgtaccctccagaaattggtgactttgcttttgtgactgacaacacttatactaagcaccaaatcagacagatggaaatgaagattctaagagctttaaactttggtctgggtcggcctctacctttgcacttccttcggagagcatctaagattggagaggttgatgtcgagcaacatactttggccaaatacctgatggaactaactatgttggactatgacatggtgcactttcctccttctcaaattgcagcaggagctttttgcttagcactgaaaattctggataatggtgaatggacaccaactctacaacattacctgtcatatactgaagaatctcttcttccagttatgcagcacctggctaagaatgtagtcatggtaaatcaaggacttacaaagcacatgactgtcaagaacaagtatgccacatcgaagcatgctaagatcagcactctaccacagctgaattctgcactagttcaagatttagccaaggctgtggcaaaggtgtaacttgtaaacttgagttggagtactatatttacaaataaaattggcaccatgtgccatctgtacatattactgttgcatttacttttaataaagcttgtggccccttttacttttttatagcttaaaaaaaaaaaaaaaaaatacttcctactgtagggtagcggaaaagttgtcttacaaggtatggtggggatatttttaaaaactccttttggtttacctggggatccattgatgtatatgttatatactgggttcctgttttatattcctggtttttaactttattaatatgagttcctgaaggtgaagggacggttttcgacattttacttccctagggactactggatgtgtagccagtcagggaaaatcggcgctagtctatttaaagaaagtttcaccgatcctgtcccg

SEQ ID NO: 7991 - DNA, 705 bp, Homo sapiens
cagctccagaagaatgagcctgcacagcttggactgtcacctctggcaggttcctgctctttgatgaagcctcgtcataatcacaggtgtttgaaagttcctccattgatcttctctctcctgctgccttgtcaagaaggtgcctgcttcccctttgccttgcaccatgattctaagtttcctgaggcctccccagccatgtaaaactagccttatcttcaacagctgccaaaattgaagaacaaaaagaatctttgaaacttcccttcaactggtcatcctcttccctttttctctcctttaaacactgttccaattcattatgatggccccaaagcaaagacagacatggaagtgaacattggagtggaaggaatgacggggagcaaatgtctgctttctttctatcattcttgtatcaactctaaattgaaacccaaatcactgaaatctaaaaaatcacatgaaagcaagtcaatgactaaaagaaaatgaaatgagagaccctatcagagaaatatgaaagggaaaataccactgattaaataagttatgggaaaaataaatcattacaccattaaatgtatacgtcgacatactgtatgttgttatgtgcttattgtctttcaccagtagaatgtaagtcccataagggtaaggactctatatattcttttcacagcagtgtctctagtgcatggaaca

SEQ ID NO: 7992 - DNA, 2127 bp, Homo sapiens
  misc_feature (2067)..(2067): n is a, c, g, or t
ctggttgtgtgtgcgtcccacccgcgttcttggcgtgcggcgtcgacgtgatggggtccctgactctctttgggggccccggtgtttgcggttgtttctgtgtcgcgcctatagatgtgtgctgggtcgcttgtcagccctgttcttaggtgctcacattcatgtttggctggtgccaatgtggtgggttgcagcagtggcggtttggtgctagtggtttgccagttgcgtcactgtcaatgtgtgggttggcgtagttgtgcatgtttgaggtggtttgggccaggggtgtgacttttgggtgccccttgtgggacgtcgattgtccgtggtcgtgctgtagttagtgtgccgccgtgtaggttaattggcgcccctggacgggtaccgggaccaagggattcggaagttgtgtgttagtgttttggtgtttagagtgagtgtttgcggtgggtcgttcggtccttgtgtgcgcttgtgtgttggtgctgttttacaataggccagtagaattcttatgagaacagcttttaagcacttcaagtggagtgcgtcatttttttggtagcttccagaaggtgccaaacaggtttcaacatcatattaattagaaatacccataataattataacaataataaaaaggtataatatggtacataaatatggaagagcagtttgtaatatgaatacattttctctagacgagatcacagttttattttgtaaatattacatttaagtatatatatacacacatatatgtacaactatatatacatgtgcatatatatgtaaatttatatttatatataatatctttatatagatagatatctgcagacaggttattgattatagagacccaagaaagcaactcaataattgttcaaagttttcctcactgactgctggtgtgtagtttaagaagcccccatttgtttgcactcagaatgccttatcttcttttaatggaacacttgatgtggaattttaagtctgagaagtgaggtgccttctgaagaagagattttagagactcccttcctctataagttggaaatgaccagaagtcttaagtagacgacagttagctgactgacagttgtaggatcgtgaatcagcctttgtaaccaaattaatagaactggtaaagggtaagatcaaatttgccaaaaaaataaaatattctccaatacaggtctctcttttaaggtggactacaattcaggagctccggctttattccttgaaatatccaaacaagcactccctgtcttgtctttctaaaaggccgatgggcctgtgcattcttgaataataacccatggactttgtgtcaagcgttggccctcacagcccacctaaaacctcagggcctcaaaatctcctgccctcccactgtgaggtaggtatatagtattatccccattttgcagctagagaaactgatgcaaatgtagaggcaattggataacttgttcaagatcactgagcaaactgctgcctggagtcaaaaattctaacttctgtacaacagggacataatttctcttttggctattatacatttcttttaaaaagcaagtgattggtaggaatttggcaaaagttgaataagttacaagaacaggcttttattcatttgctatttggtttttatgtttcttgtttacttcgtttgatttgtttctcaaaactcactcagtgggattacctgtctgtcatgtagcagctttttaaaaaactggactgtgcagtgtggttctgagtgcagtctttataaagcccagtgctgtactggtaaatataaacattttataacgtgaaaagcacaacgacacaatatgtccccttaatagctggaaaaaccaatataagccctcccactccctactaccactgattgccaccaaacaaataaacaaaatgcccaccccacccaacaacaacaataacacatcaagggggaaaatgtcatatttcctggacctaccacaatgtacagaaaataacagacagtgttatcaaatcccactctatgtcttctagggaaatctttatgtnttgtgtctacctactgagtctgtagaataaacaatttcctttaggaaacataaaaatagg

SEQ ID NO: 7993 - DNA, 7932 bp, Homo sapiens; identical to SEQ ID NO: 5763

SEQ ID NO: 7994 - DNA, 1636 bp, Homo sapiens
gtcctttttttttttttttttttttaagcttcgctactgttctcactttttgcttagcaaacacagcagatgatattgcacggcataaagtgagaacagtagcgaagcttaaaataaatgaaagaaaccttaatgcagtacaggagatactcagaaacaaaccagaataatgcctaatgcattacacgtttttgttgctacacacaaaaatacagaagaagcatcggacagagagaaagagagagagacaaaatattagcaaacaaccataactgggtacaataatcatttagtctgaaatgtagatgcaacgtagaaactaccactgttttctaattgacaaagaaaatgacagcaacatttgtcttttatcaaaaaatcttctaagcccctcatggttagggttttaattaactatttaattatgtatttaccctttttttttgtctttttttcattgctaaggaagaactccctctgctcttggaagattttctactctactgatcttattttattttattttatttttacctgatgattgtcttaggcaccctccttacataataaaccatcaagctaacttgaacagggaaactgagtcacactcaaacaatagctaaggtcaaaagtgtagtgaaagtagaaaaagtggggaagggataggtctaagtgagtgacagatgggctgattcagacagggcaataagcacagggagatatgaagacaactaccaaagcaagtggaagacaaggttttcaactttattgtattgaaaaatacttgtcacttggttcagatggcaaatctaaaatgagcccacaatgattatgtaataaatgcagaacgtaccacaacaaatcgagactaacacagaaacagaagatgtgactttgtgaatacaacgccgctcagcgcttcactgctgatgtaggagtcgactccctcaaccattgtcctaggtttctataactcatcgcacagcatttgtattaaaaacaaatcattggtcaatgctttccaacagaacactgagtgatcctgcaacccaaagcagatttattgccctattaaaatacataatgagtaataaaaatgttcctaagaaaatgtaacatttgacctgaagtctaagcccctctctttccttccccaccacagtccaccccctgtgggagggaaagagaaaggtaaaatttgtatgttgagagggaaagtatttacatctatgggtttatgatgtgtagtgagggcaacttctttcagcaaaataaaacaaaatagtgggcaccgactcttctgaggatgccactgtcagttgagaattctgtgtgtgtgctcatcacaggtagggccaagtatctgaactgcctccatgaagggagctgagggcagggatcatctctagtgcagaaaagaaaccagtgggaagatgaagagtgagcagagacaaactcagagaggcgtggagtacattcaccccagtaccctgacatttgaggatgactcctgtgactttggtaggggcgcgtggggagaggaggggcagtcatgagtagcagattccaagaaactgatgtggagagggatgtgtaactttgatttttctcttaaattctattgataatttgaggc

SEQ ID NO: 7995 - DNA, 1084 bp, Homo sapiens
ccgcgaccaggacaaggggggacacaagggggggaccccctcacctcttggccctccccgaggcgcactccgggaccacaccctcttcgccaaagccacatgtggttaaaaacgcgccaaagagaagaaaacagggcgggtaagaccatgacaatgcttctctggactcaaaccaggaattccaaaagatttcaagccagggagaagggttcttggtgatgcagggcatggaacctggacaccctcagctctcctgctttgtgccttatctacaggagcatcgcccattggacttcctgacctcttctgtctttgagggacagagaccaagctagatcctttttctcacctttctgcctttggaacacatgaagatcatctcgtctatggatcatgttgacaaactaagttttttttatttttcccattgaactcctagttggcaattttgcacattcatacaaaaaaatttttaatgaaatgatttcattgattcatgatggatggcagaaactgctgagacctatttccctttcttggggagagaataagtgacagctgattaaaggcagagacacaggactgctttcaggctcctggtttattctctgatatagactgagctccttccaccagaaggcactgcctgcaggaagaagatgatctgatggccgtgggtgtctgggaagctcttcgtggcctcaatgccctcctttatcctcatctttcttctatgcagaacaaaaagctgcatctaataatgttcaatacttaatattctctatttattacttactgcttactcgtaatgatctagtggggaaacatgattcattcacttaaaatactgattaagccatggcaggtactgactgaagatgcaatccaaccaaagccattacattttttgagttagatgggactgtctggatagttgaacctcttcactttataaaaaaggaaagagagaaaatcactgctgtatactaaatacctcacagattagatgaaaagatggttgtaagctttgggaattaaaaaacaaatacattttagtaaatatatatatttaaatagtcaaagt

SEQ ID NO: 7996 - DNA, 618 bp, Homo sapiens
ttttttttttttttttttggttaaaaaaaaaacatatatatatgtgtatatatacatatgtatatatgtacacaaacatataatacttgggaacaataaaatgcataggggtgtgggccttttcacattttaggaagaaaaggtgatccagatggctatctagaaaggcaatgattgagaagggcacccaacaacagcaacaataaaaaaactacccctcaactcctttgcactggttctgtggcttccccaggacagacagagaaatagcctcctggtatgagacaggcccggtgggcacaggcagggctttgagcctcgtaggcatataaaggctaccggtgccaatagagggtctatattccaggcccaaatgccatcaaagcaaaaacaaaatggtgacatcaaaataaaaagagtgctttccacctccagggaacgtcaaagggagcttcaggctaagacaccaagtaccagcagagagggtgcttcaatgcttactgatataaccaaaggtgatgaaaaaaacacatcaaggcatcaaaagcaaggccaaaggagtttttaaaaaatcaaagctcatgaacaactgctaagggcttctaagaaagatgtgct

SEQ ID NO: 7997 - DNA, 437 bp, Homo sapiens
gccctccccgcgtgcaaggccccagcggaagcaagatcgacagggtgctggctttgttcccagctgaccccgagagcagctccgtggacgtgcaggcccaagatgcgggctgagctggagtatgggctgaagaagaagagccacgggctggccacggtcaggatgctgcccacctacgtctgcgggctgccggacggcacaggtgggccagcacagcctccctctctgaacagccatccagggctcccgtcaaaactccttaaagccagtgaggttcttggtttttagaaacttgggttcacgtctctaatggagggcaagagtaagaagaaggctagtattctttctaaatctgttggcctttgttaacccaaggcatttgcagtaaaaacaaaacaaataaacaaacaaaaacccaaaaaccctaaaaaaaaaaa

SEQ ID NO: 7998 - DNA, 4607 bp, Homo sapiens
agcggggaggcgccctggccgtggccggcctctatctcgggcccgcccagaattcccagatggtgcccggttgccaggctctgggctggagcggtgtctcttccttcctgggaatggatgtgcggcgggggggactgcgcccggctggggcggggccgaatcgtgccttttagatagtcacaacttagcctcctccttttccatccgcgatttttttggacattaaaactaccactactatggaagtaccactactagatggaagtttgacctggacatggtggctcacacttgtaatcccagcactttgagaggccaaggcagcagagcccttgctagaagcgggtggcatggcggagaaggatgacaccggagtttgacgaagaggtggtttttgagaattctccactttaccaatacttacaggatctgggacacacagactttgaaatatgttcttctttgtcaccaaaaacagaaaaatgcacaacagagggacaacaaaagcctcctacaagagtcctaccaaaatacctgggatatagtaatcactcaatgaatataaactgcacttactggcatgctcaaggaatgggctattaagcaaggtatcctgttaaaagtggctgaaaccatcaaaagttggatttttttttctcagtgcaataagaaagatgacttacttcacaagttggatattggattccgactcgactcattacataccatcctgcaacaggaagtcctgttacaagaggatgtggagctgattgagctacttgatcccagtatcctgtctgcagggcaatctcaacaacaggaaaatggacaccttccaacactttgctccctggcaacccctaatatttgggatctctcaatgctatttgccttcattagcttgctcgttatgcttcccacttggtggattgtgtcttccaggctggtatggggagtgattctatttgtgtatctggtcataagagctttgagactatggaggacagccaaactacaagtgaccctaaaaaaatacagcgttcatttggaagatatggccacaaacagccgagcttttactaacctcgtgagaaaagctttacgtctcattcaagaaaccgaagtgatttccagaggatttacactggtcagtgctgcttgcccatttaataaagctggacagcatccaagtcagcatctcatcggtcttcggaaagctgtctaccgaactctaagagccaacttccaagcagcaaggctagctaccctatatatgctgaaaaactaccccctgaactctgagagtgacaatgtaaccaactacatctgtgtggtgccttttaaagagctgggccttggacttagtgaagagcagatttcagaagaggaagcacataactttacagatggcttcagcctgcctgcattgaaggttttgttccaactctgggtggcacagagttcagagttcttcagacggttagccctattactttctacagccaattcacctcctgggcccttacttactccagcacttctgcctcatcgtatcttatctgatgtgactcaaggtctacctcatgctcattctgcctgtttggaagagcttaagcgcagctatgagttctatcggtactttgaaactcagcaccagtcagtaccgcagtgtttatccaaaactcaacagaagtcaagagaactgaataatgttcacacagcagtgcgtagcttgcagctccatctgaaagcattactgaatgaggtaataattcttgaagatgaacttgaaaagcttgtttgtactaaagaaacacaagaactagtgtcagaggcttatcccatcctagaacagaaattaaagttgattcagccccacgttcaagcaagcaacaattgctgggaagaggccatttctcagatcgacaaactgctacgaagaaatacagataaaaaaggcaagcctgaaatagcatgtgaaaacccacattgtacagtagtacctttgaagcagcctactctacacattgcagacaaagatccaatcccagaggagcaggaattagaagcttatgtagatgatatagatattgatagtgatttcagaaaggatgatttttattacttgtctcaagaagacaaagagagacagaagcgtgagcatgaagaatccaagagggtgctccaagaattaaaatctgtgctgggatttaaagcttcagaggcagaaaggcagaagtggaagcaacttctatttagtgatcatggggtaaagtccgcatggaattagagggggaaagtctgcactggaacctgctgtggccattttttttctgttgttgctgcttctctagtggagttactgcagcttagggatggttcctggaagtggacacattttacaaaaacgttttttaaatacacgccagctcttcgagaagcacttttttccttccgtcatgcttcatactatattgtattgtactaacccctcatgctgggatgagcgactgcctagcaagcaacccactgcctactaacatcaagaggggctaaataaaactgcattttccttgcaagggacaacttctaccgtatgaatatatattatatttatgtattatattttgtacaatagttgatcttgaatgcagacttcatttgtatttttcgtggtactacaaaatgtgtagaagttatggcttttctttcattagggtcttgttaggtggttggcaagtaagttaaattgtatgttgcatttttttccatgctgttttaacttgtaaatatatatgtatacatgtggaagatattattattatctagattactttaagccttttatctgatgtattatcagtgaaaaccatgctgcttattccctaatacaatggttctcaaactttagtgtgtatcagaatcaagatgagggcttgtaaaatatagctggtcccaactcccagagtttccatttcaggaggtctgggatcaggcccaagaatttgcatttttaacaaattcctaggtgataactgataatgttggttcagggaacacactttcagaaccactgctttaatattttaaataagataatatgtgaggtgtcataaaaaccttcatcaaatccctatctcatttcatttcttaggcattttctctcttataaagtttcctggatttataaattttcattgattttactagaaagttttatttagcttttatttatttattgttctttttaagaaaaaaactgagagtttgaattaaaagtttaaatcattgctaggtccttagttattttttttcttttttctttttttttatttgaagccgtgttgaaatccttgtctcctgtagacccagtggaacccataagtaattcagaaccatcaatgaattcagatatgggaaaagtcagtaaaaatgatactgaagaggaaagtaataatccgccacaacagacaatgaaataagtaggactgagtatttatgtgaaaactctctagaaggtaaaaataaagataattcttcaaatgaagtcttcccccaaggagcagaagaaagaatgtgttaccaatgtgagagtgaagatgaaccacaagcagatggaagtggtctgaccactgcccctccaactcccagggactcattacagccctccattaagcagaggctggcacggctacagctgtcaccagattttaccttcactgctggccttgctgcagaagtggctgctagatctctctcctttaccaccatgcaggaacagacttttggtgatgaggaggaagaacaaataatagaagaaaataaaaatgagatagaagaaaagtaagaaccaagattcatatgaagtgatattagattgttccttttacaaaagtgtttagcttcaagactggaaagggaatatgagtgtaagtttactatatgtaaagctaagatgtggatttaccaggagaaccctggtttgaataactgatctgaaattagtagttacctgtaaatggcagatcttttaggaaaataagagaaaggtaagggctcttttgaataaactgctgttttatttgtggcacaactgatcaatcttggaaattctttaagtatttttaataagaaatgaattatcatttcttgccagaatttgctaccttaaggtgattgggaaaattctgttgcaagaacattaacatttagtatgactcctttttactgtattcttgcagttaataactgcagctattatgttaataacaagttgtttgtattttatttttgtttataccagtcttaaagatccaggttctgaataaaaaaattaattgatacaaaaaaaaaaaaaaaaaaacaagcacaaaaacaacaacaaaaaaaagaaaaaacaaaaaaaaaaaaacaacaacaaaacaagggggggcggcgccccctcaaaaacatactccccgaaggcggcggccccagataatgcccgccgacccccccgtctttcacgacacgacgggcgccccccatgaggacacccgcgtatcaatcagcccgcgaccggcgaccgcgtgtaaaaccacgccgcgctcggggcaacccggcgcccc

SEQ ID NO: 7999 - DNA, 1045 bp, Homo sapiens
  misc_feature (10)..(10): n is a, c, g, or t
  misc_feature (58)..(58): n is a, c, g, or t
  misc_feature (87)..(87): n is a, c, g, or t
actgaatgcngggggcagcagaggcagctctggccattggggcagccgcacgactgtngggggcagtcaggaccgggaagccttggnagtgtagggtgccgtgaccagggagggtctgcttcttgcaacagcccctttccctttgcacagaaaataatctgaggacaagaacagtggcgtggctggaatggctggggctgctcagggcctctgttgttcagctgggcttgcacctgaggctgacccctggtctctgagacaagctgatggccatcagatgccacaacccctgtctggacaggccccgaggacgtgtgtcaccgtaaggagctcaaagaggattggtggagtgtctgggtcagaggtcaggacccaccttgcatcagcgggcttgggtttagtcatttacctaggaggttgagggtcatcctggcttaagtccagggcatagcacagcaaaatttaccctttgggagttcataaagaacatgcatagttctggcctcgtggcggtcgccagctctcccagggccctgctcttctctgagtgaccactgccctctggtctggtggacgcctgggcatctgtttctatgaaacaacctgtttgtttctgtgtttcaaatatttgtgtttattatggaagagacattattttttcatggaattctgaagactgtcatttttgaaggataagcaggttttggacaatttgcaattcttacaactgtctgtaaatttacattactgttataaatgagaagacccttctgatattcagacaccttgttaaatactggctcgtcattgatgcgtgcagcccagtgtgggctttgtgggggtttgaagtgtgtgtggtttgtagcacacggacattcccctcccaacgcagaggcatctttggcacgagcttcaaccgtaaatccagaaacaagcttgctggctttggacttcatgggccggttaagtaaccccccatagctgaggactgatttaaatgtacttttaattttgtccaacaataaaaaaaaaaataaagcaaaaa

SEQ ID NO: 8000 - DNA, 1521 bp, Homo sapiens
ttacttcgcggtgctacccgtactacattgtctcactagacatgaaggagcttgtagctttgggtgctcgagatcacagaacattttcctttaaaaggaaatgatgccaataacttactacgaaggcggccgaggaacgtgtgtattggctttgtagcaaatgtaatgccctggatcttcctacgagtcctctggtactatgaggtactaacctccactgtaattaatcttaccgccacaaattccatagtgatcctccttccctaaaactatagtcctctgggattctctgggctagttgaggattgctaccctgtgccttcaaccctgtgatgtgggatcccagacttccctatctgttaactaaagggctgttttcaatcaaataattgttacgagaagcagactggcgcctgtagcactgctgttggagatccaaataggagattgggttgggaagtttttcccttgagtctctgctattttaatgtttaatttgcgctgtcgaggcgagtgtgtgtgttgcatctggacgccagggtttgcccaatctttgagtgtttggttaaatgttcaaactgtggcttcctcccggcgccagtcgcccgcctctgcccttaggttacattctcttaaacatgcctttctcccccactctttcgcaggtgttcatgatttcttttattctttgcacaacaacaacaacaacaaattcacggaatcttttaagtgctgaacttatttttcaaccatttcacaaggaggacaagttgaatggacctttttaaaaagaaaaaaaaaatggaaggaaaactaagaatgatcatcttcccagggtgttctcttacttggactgtgatattcgttatttatgaaaaagacttttaaatgccctttctgcagttggaaggttttctttatatactattcccaccatggggagcgaaaacgttaaaatcacaaggaattgcccaatctaagcagactttgccttttttcaaaggtggagcgtgaataccagaaggatccagtattcagtcacttaaatgaagtcttttggtcagaaattacctttttgacacaagccctactgaatgctgtgtatatatttatatataaatatatctatttgagtgaaaccttgtgaactctttaattagagttttcttgtatagtggcagagatgtctatttctgcattcaaaagtgtaatgatgtacttattcatgctaaactttttataaaagtttagttgtaaacttaacccttttatacaaaataaatcaagtgtgtttattgaatggtgattgcctgctttatttcagaggaccagtgctttgatttttattatgctatgttataactgaacccaaataaatacaagttcaaatttatgtagactgtataagattataataaaacatgtctgaagtcaaaaataaaaaacattacccagtgtttggtggtgcacatctatagtcctagctacccccgaggctgagacgggaggatagctggagcc

SEQ ID NO: 8001 - DNA, 4645 bp, Homo sapiens
  misc_feature (1043)..(1066): n is a, c, g, or t
  misc_feature (3054)..(3060): n is a, c, g, or t
tgcaaggcctgcagagttagcaccagctccactagggccatagatgccccctcctttgtgcctagctcctgcgaatccaccgagtgcctgagaccatagcttctactgtgcccacccaggcagggaccctcggccccctctcctccatttctgagcccccatggccagatcctgggcagggaaatgatcctttcaggagacaaccagagcccctcaccaggaacgggggcacccgtggactacgggagggtggcggttgggttctctgctccctcccagctcctgaacctggaacaatcggcagaaaacccaggaaccccggcactcctgcattcagcacgggattcccccacccatgcccagaagccctgaccttgctgtttctggaaaaagcatggggtggggcagggagggctggcatttcccccagaagaccttgccctttgacctgcccactctccacactgcctcacctggaaagccatgtcctgctggcctcattccttcctgaagggcctaggagtggggaggcctgggtagggctgccacaggctgggtagagccgccctggcaggaagcagggggtaaggtggccataccagcacatgctgcactaggagcagagccctgcacctgcctagctgccttcctgggagaaacctccctgggagaccatggccccaagccctggcctctagtgatacgcccctcgggaatctcctgttccggggcctgattctcaggaacaccaggtttcagaccatcttcagcacctaatgttgatgggtgtcaaacatctcctggagtggaccaactcgcaaccctgcaaagtcggagctgctgagaaggggcagctctgaatagaggggcatctgcctgaacctcacttttcctggggccctctccttgaccccgtagccaccaccatactgcttccagggggtccagctctgcttcccttcccacctgtcctagagtggacagagctttttccttgggttctctcttgcatcactaagttcagcagggaatttgcggaattnnnnnnnnnnnnnnnnnnnnnnnntaagggagaacagaaagaaaatcctagaaaatacagagtatccatgctggcagctttttgtacgacacccatagggacccccccaaatagctattacaaaggggcagcccattcactacacaagaaccccacacctggcttccaccctccccagctcctgcacttctccccagagcgggaccctcttacttccccccatgaaggggggcaccttgtgctaaggccaaggctgagcgaggtcccagctcacctccctgcttgatccagattgcactgtgatgagcacattgctgacctaggccagtcctggggcaggcgtgctctctctcccatacataggagtggcctcaaggccacccagtgctgaccccaacagagccctgaactgtccagaaactgcatcctcagcacaggaagtacccacatggacagagggaagcccagcctcggggccggttgcctcctcttctctgggtgttctccagtggcttcttggagcctaggctggtttatctcccctgcctaaaaggccctggggttgccaatgcaaattcattaaaacgaagaccagatatcccagactgcacagaggccgagagaaatggtatagtgcgtgattagcattgctgccctccaacctcctgggattcatgcagataatcagaaactgactatgactcccaagttctctgaaggatgagatcacaactgacaactcttacgacagagggagagtggtgagagagagaaagagggtactgggctagagccatgttcttcctgccgaggtgccagggggaggcgacagtgggcagggggtgctggggccttacctgtctgccctggtggggatgaaagacaggtgacaggcaggtgccctgtgcacagccttatcattgaagacaggcccaggacagcctgccccatctgccccagccccatgggatggttggtccagcctgactggggcaggattagctgcaattcctgccctgtgtgtcgtccagccagactgcctcttgaaagatggcttgtccaagcggcagacagtggtagaacaacccagggcttggaaatctgacctccttgtccatgccaacagcctgggagatgagacagggttagaggaaacagaggcccaggatacggcaggttctgcctgggagtgtacaatggttggagtccagagccaacgatgtggtccccagcggggtgtgcccctcctgctgacgagggtacagatccatacccaggtcaattcctcccgggcccctgtttggaggctgctacagccttgagttccttggagagagaggacacgcctgtggaatgtcaccttcagtcccgtgcaggcaaaaggcccctgcacaccagggccctaggaaagcagcatcaggtgctgggatcccacccagctggcacgggcacgttcttgccctgcacactccatgctgcccttccctaagctcgcaggggcagacaccaagagaagggcgcgtccccgagtcccctgggtgacctgtgtcaggacagcaggcaagaatgaaacgtggccttggctgacgggttggaatatttgtgaccgttcttgtctttctccctcctgcttccccggcaccctagccccatctccaggagcccctcaggcagagtaagtggggagtgtgtccagggatttttttgtgtttaccaaggtcctgctgtgcacttagaatctgtcaccataaatacttatctcgcagttaccccagcaagagggtgttatttcccccattttataaaaggaaattaaggctgggcaaagttaagacttgcttgtcagtggtcatggctgttgtcttgccacccccagctggggagaaggaagaaaactgggccgggaacccctcccctcagtgtcccccagttctccatctccataaggagccatcaggctgtcattaaggaacagagtgtcactcagggggcactgtcacaaagcagaccannnnnnncatgggccgggggtgcagaagcctggcttatttcaggctgacagctggaccctctgggtgcaggggctcaggcagtggccaagagcccaaagggctaaggcccgtgacgaccacccagcccgtcaccccaggtacaaacactgaccccaaagcaagagcagggactgtccctcagccctcagggccttcatgcagggtgcagaatctcatgtccacatggaggtcacccctcaggtcacacccactcccagagcaaccctgggcagggaggggcaccctggggttgtgttgaccacctccccttcaggtgaggcccttttctgccttctttctagccccctgcatggggcacctgctattgctggggctctggggtggaccctgtgtgatttctgtcagggagcttgtgctgtgcatggccagaggtgtttacatccagaagggcccagcacggccctgtggggtgtggggggaatatggtagatcattgtgatgtgcctcggggccctcttgccttggagccagctttgtttcagaatctgctacttgggccctcttcagggttttgaggctggagaagtgagttgggacagtcactgtcatcaccacccaccctgtcacccacctggaaaacattcttgatatactggccatgctgggccgggctcacatccactgagggtatagtgaccaagcatctaaaccagtcgttctcaaacttcggtgagtatcagaatcacctggaagggcttttacagattgctggccccaccccccagaatttctcatcaggagtgggcaagaccaatcatttgcatttctaacaagttcctaggagctgcagctgctggccctggaaccacactttgagaaccactgctttagaccaaacaccaaaggaagatgcagccaccctcctttacatgtcacaacgctcagggtccatgagtacctcaggctgtccagctgagctccacctgcagcagccgagattcccgactcgctccaccattgggggctaggagtgaagcgtgtcaccatggtcagctcatggccagccaggaaagcctctctgctgtgcgtctgtgcagttcttgttcttccctggaggactcttggatcgcctgtgatcttggccaggagaccaggtgcctgggtcccttcctggaaggggacaagttacacaccccagccccattttcccaccaacttctacatgccttgggagaacctgctacatgttggctgcccccttcccctatttcagcagtgcccagtcctgcttataaacctgaggcctgctccccataccctgccctgtgcaagtgccagccgttattccaggcagcccaatgttgttgaggccagatggattcctggaagcagctggcccatggatgtgagtcatcacagtattctagaaacagagaagaggtcttaacctaatgcgcatagagaaattgttctcattgtaaacatacccctgtccttagctgatctaggtggaagcccagcttcatgtgctagggggcatgataatgataataaaggaattgtatctaggactaaaaaaaaaaaaaaaaaa

SEQ ID NO: 8002 - DNA, 2713 bp, Homo sapiens
ggctcctcattggggtgcttggggcgcacccatcggggtaccgggcgtcccggaattgtggggggcacgagggggcggcgtgcgccgcggtgcctagtgtgggatgtaagcgcggaggccgccgcccaccgcccgccgccatggggctgaaggccgcccagaagacgctgttcccgctgcgctccatcgacgacgtggtgcgcctgtttgctgccgagctgggccgagaggagccggacctggtgctcctttccttggtgctgggcttcgtggagcattttctggctgtcaaccgcgtcatccctaccaacgttcccgagctcaccttccagcccagccccgcccccgacccgcctggcggcctcacctactttcccgtggccgacctgtctatcatcgccgccctctatgcccgcttcaccgcccagatccgaggcgccgtcgacctgtccctctatcctcgagaagggggtgtctccagccgtgagctggtgaagaaggtctccgatgtcatatggaacagcctcagccgctcctacttcaaggatcgggcccacatccagtccctcttcagcttcatcacaggcaccaaattggacagctccggtgtggcctttgctgtggttggggcctgccaggccctgggtctccgggatgtccacctcgccctgtctgaggatcatgcctggagctggctgtacctgaaaggatcatacatgcgctgtgaccgcaagatggaggtggcgttcatggtgtgtgccatcaacccttccattgacctgcacaccgactcgctggagcttctgcagctgcagcagaagctgctctggctgctctatgacctgggacatctggaaaggtaccccatggccttagggaacctggcagatctagaggagctggagcccacccctggccggccagacccactcaccctctaccacaagggcattgcctcagccaagacctactatcgggatgaacacatctacccctacatgtacctggctggctaccactgtcgcaaccgcaatgtgcgggaagccctgcaggcctgggcggacacggccactgtcatccaggactacaactactgccgggaagacgaggagatctacaaggagttctttgaagtagccaatgatgtcatccccaacctgctgaaggaggcagccagcttgctggaggcgggcgaggagcggccgggggagcaaagccagggcacccagagccaaggttccgccctccaggaccctgagtgcttcgcccacctgctgcgattctacgacggcatctgcaaatgggaggagggcagtcccacgcctgtgctgcacgtgggctgggccacctttcttgtgcagtccctaggccgttttgagggacaggtgcggcagaaggtgcgcatagtgagccgagaggccgaggcggccgaggccgaggagccgtggggcgaggaagcccgggaaggccggcggcggggcccacggcgggagtccaagccagaggagcccccgccgcccaagaagccagcactggacaagggcctgggcaccggccagggtgcagtgtcaggacccccccggaagcctcctgggactgtcgctggcacagcccgaggccctgaaggtggcagcacggctcaggtgccagcacccgcagcatcaccaccgccggagggtccagtgctcactttccagagtgagaagatgaagggcatgaaggagctgctggtggccaccaagatcaactcgagcgccatcaagctgcaactcacggcacagtcgcaagtgcagatgaagaagcagaaagtgtccacccctagtgactacactctgtctttcctcaagcggcagcgcaaaggcctctgaactactggggacttcggaccgcttgtggggacccaggctccgcccttagtcccccaactctgagcccatgttctgcccccagcccaaaggggacaggcctcacctctacccaaaccctaggttcccggtcccgagtacagtctgtatcaaacccacgattttctccagctcagaacccagggctctgccccagtcgttagaatataggtctcttctcccagaatcccagccggccaatggaaacctcacgctgggtcctaattaccagtctttaaaggcccagcccctagaaacccaagctcctcctcggaaccgctcacctagagccagaccaacgttactcagggctcctcccagcttgtaggagctgaggtttcacccttaacccaaggagcacaggtcccacctccagcccgggagcctaggaccactcagcccctaggagtatatttccgcacttcagaattccatatcttgcgaatccaagctccctgccccaaataacttcagtcctgctccagaatttggaaatcctagtttcctctccttcgtatcccgagtctgggacacaaaactccgcccccagcctatgagcatcctgagccccgccctcttcctgacgaaactggccccggatcagagcaggacctcccttccgaccctctgggaacctcccagaggtccagcccatctcggagcatcccggaggaaatctgcagagggttaggagtgggtgacaagagcctgatctcttcctgttttgtacatagatttatttttcagttccaagaaagatgaatacattttgttaaaaaaaaaaaaaaaaaaaaagaagataaaaaaaa

SEQ ID NO: 8003 - DNA, 4584 bp, Homo sapiens
  misc_feature (1442)..(1467): n is a, c, g, or t
  misc_feature (2187)..(2212): n is a, c, g, or t
  misc_feature (2860)..(2874): n is a, c, g, or t
gcctttgcaaaaacactctccaagaacttgcagaaaaaggggaagctgcaaaagctggggttaaaaagaaataaaaaaaatgaacgaagaataaacaaaatggtgaaaaatttgcatctctgtccaaaactgaaaaaaataaattttcgggaaaaaaaaataaataaaaaagtggtgctaaaaaatgtggaagttctccctaaaataaaaaggctccggaaaattaaaataaaaaaaaaaagaatatgcgtgtaaaaaataatctgcttggcaagggtggcagtcacgtgtcctaccgtcaggatgcttcaggccagggaggcggacctcatcttccttctttccccgcccacagagaaaaatgcagagctacaaagagctccagacctgcaggaaagtgacggccagaggaaaggggctcagagcagaagcttgacgctcaggctgcagaagtgtcagctccaggtccacgatgcggaggccctcatagccctgctccaggaaggccctcacctggaggaagtggacctctcagggaaccagctggaagatgaaggctgtcggctgatggcagaggctgcatcccagctgcacatcgccaggaagctggacctcagtgacaacgggctttctgtggccggggtgcattgtgtgctgagggccgtgagtgcgtgctggaccctggcagagctgcacatcagcctgcagcacaaaactgtgatcttcatgtttgcccaggagccagaggagcagaaggggccccaggagagggctgcatttcttgacagcctcatgctccagatgccctctgagctgcctctgagctcccgaaggatgaggctgacacattgtggcctccaagaaaagcacctagagcagctctgcaaggctctgggaggaagctgccacctcggtcacctccacctcgacttctcaggcaatgctctgggggatgaaggtgcagcccggctggctcagctgctcccagggctgggagctctgcagtccttgaacctcagtgagaacggtttgtccctggatgccgtgttgggtttggttcggtgcttctccactctgcagtggctcttccgcttggacatcagctttgaaagccaacacatcctcctgagaggggacaagacaagcagggatatgtgggccactggatctttgccagacttcccagctgcagccaagttcttagggttccgtaagcgctgcatccccaggagcctctgcctcagtgagtgtcctctggagcccccaagcctcacccgcctctgtgccactctgaaggactgcccgggacccctggaactgcaattgtcctgtgagttcctgagtgaccagagcctggagactctactggactgcttacctcaactccctcagctgagcctgctgcagctgagccagacgggactgtccccgaaaagcccctnnnnnnnnnnnnnnnnnnnnnnnnnntgtccacgggttaaaaaggtggatctcaggtccctgcaccatgcaactttgcacttcagatccaacgaggaggaggaaggcgtgtgctgtggcaggttcacaggctgcagcctcagccaggagcacgtagagtcactctgctggttgctgagcaagtgtaaagacctcagccaggtggatctctcagcaaacctgctgggcgacagcggactcagatgccttctggaatgtctgccgcaggtgcccatctccggtttgcttgatctgagtcacaacagcatttctcaggaaagtgccctgtacctgctggagacactgccctcctgcccacgtgtccgggaggcctcagtgaacctgggctctgagcagagcttccggattcacttctccagagaggaccaggctgggaagacactcaggctaagtgagtgcagcttccggccagagcacgtgtccaggctggccaccggcttgagcaagtccctgcagctgacggagctcacgctgacccagtgctgcctgggccagaagcagctggccatcctcctgagcttggtggggcgacccgcagggctgttcagcctcagggtgcaggagccgtgggcggacagagccagggttctctccctgttagaagtctgcgcccaggcctcaggcagtgtcactgaaatcagcatctccgagacccagcagcagctctgtgtccagctggaatttccnnnnnnnnnnnnnnnnnnnnnnnnnntggcactcaggttggctcactgtgaccttggagcccaccacagccttcttgtcgggcagctgatggagacatgtgccaggctgcagcagctcagcttgtctcaggttaacctctgtgaggacgatgatgccagttccctgctgctgcagagcctcctgctgtccctctctgagctgaagacatttcgcattcagagctcccaagacccagggcggctcctgcctgacctgttgccctttgacccccaccaggctgacctccagctgtgtgagcaccgagggcctcgcccacctggcatctggtctgggccactgccaccacttggaggagctggacttgtctaacaatcaatttgatgaggagggcaccaaggcgctgatgagggcccttgaggggaaatggatgctaaagaggctggacctcagtcaccttctgctgaacagctccaccttggccttgcttactcacagactaagccagatgacctgcctgcagagcctcagactgaacaggaacagtatcggtgatgtcggttgctgccacctttctgaggctctcagggctgccaccagcctagaggagctggacttgagccacaaccagattggagatgctggtgtccagcacttagctaccatcctgcctggnnnnnnnnnnnnnnngaagatagacctctcagggaatagcatcagctcagccgggggagtgcagttggcagagtctctcgttctttgcaggcgcctggaggagttgatgcttggctgcaatgccctgggggatcccacagccctggggctggctcaggagctgccccagcacctgagggtcctacacctaccattcagccatctgggcccaggtggggccctgagcctggcccaggccctggatggatccccccatttggaagagatcagcttggcggaaaacaacctggctggaggggtcctgcgtttctgtatggagctcccgctgctcagacagatagacctggtttcctgtaagattgacaaccagactgccaagctcctcacctccagcttcacgagctgccctgccctggaagtaatcttgctgtcctggaatctcctcggggatgaggcagctgccgagctggcccaggtgctgccgcagatgggccggctgaagagagtggacctggagaagaatcagatcacagctttgggggcctggctcctggctgaaggactggcccaggggtctagcatccaagtcatccgcctctggaataaccccattccctgcgacatggcccagcacctgaagagccaggagcccaggctggactttgccttctttgacaaccagccccaggccccttggggtacttgatggccccctcaagacctttggaatccagccaagtgatgcacccaaatgatccacctttcgcccactgggataaatgactcaggaaagaagagcctcggcagggcgctctgcactccacccaggaggaaggatacgtgtgtcctgctgcagtcctcagggagaacttttttgggaaccaggagctgggtctggacaaaggagtaccctgcattacgtgggatatgtgtgatcaattggggacatgcgacacacaatgagggtgtcatgacaatgcatgacacgtacggttatatgtggcagtgtgaccccttgacatgtggcgttacatgaaagtcagtgtggcacgtgttctgtggcatgggtgctggcatcccaagtagcaggatacatgattgttggtctatatatgacacatgacaaatgtccatgtcacaggactcatggctggccagatgacctcaggctggcccaagatctaatttattaatttttaaagcaaatacatatttatagattgtgtgtatggagcagctaagtcaggaaaagtcttccgcccgagctgggaggggagagtgtccatgcactgaccagtccaggggctcaagggccagggctctggaacaagccagggactcagccattaagtcccctcctgcctcaatcctcagcctacccatctataaacttgatgactcctcccttacttacatactagcttccaaggacaggtggaggtagggccagcctggcgggagtggagaagcccagtctgtcctatgtaagggacaaagccaggtctaatggtactgggtagggggcactgccaagacaataagctaggctactgggtccagctactactttggtgggattcaggtgagtctccatgcacttcacatgttacccagtgttcttgttacttccaaggagaaccaagaatggctctgtcacactcgaagccaggtttgatcaataaacacaatggtattccacgtctagcgtgaaaaaaaaaaaaaaaa

SEQ ID NO: 8004 - DNA, 3955 bp, Homo sapiens
accgctccggagcgggaggggaggcttcgcggaacgctctcggcgccaggactcgcgtgcaaagcccaggcccgggcggccagaccaagagggaagaagcacagaattcctcaactcccagtgtgcccatgagtaagagcaaatgctccgtgggactcatgtcttccgtggtggccccggctaaggagcccaatgccgtgggcccgaaggaggtggagctcatccttgtcaaggagcagaacggagtgcagctcaccagctccaccctcaccaacccgcggcagagccccgtggaggcccaggatcgggagacctggggcaagaagatcgactttctcctgtccgtcattggctttgctgtggacctggccaacgtctggcggttcccctacctgtgctacaaaaatggtggcggtgccttcctggtcccctacctgctcttcatggtcattgctgggatgccacttttctacatggagctggccctcggccagttcaacagggaaggggccgctggtgtctggaagatctgccccatactgaaaggtgtgggcttcacggtcatcctcatctcactgtatgtcggcttcttctacaacgtcatcatcgcctgggcgctgcactatctcttctcctccttcaccacggagctcccctggatccactgcaacaactcctggaacagccccaactgctcggatgcccatcctggtgactccagtggagacagctcgggcctcaacgacacttttgggaccacacctgctgccgagtactttgaacgtggcgtgctgcacctccaccagagccatggcatcgacgacctggggcctccgcggtggcagctcacagcctgcctggtgctggtcatcgtgctgctctacttcagcctctggaagggcgtgaagacctcagggaaggtggtatggatcacagccaccatgccatacgtggtcctcactgccctgctcctgcgtggggtcaccctccctggagccatagacggcatcagagcatacctgagcgttgacttctaccggctctgcgaggcgtctgtttggattgacgcggccacccaggtgtgcttctccctgggcgtggggttcggggtgctgatcgccttctccagctacaacaagttcaccaacaactgctacagggacgcgattgtcaccacctccatcaactccctgacgagcttctcctccggcttcgtcgtcttctccttcctggggtacatggcacagaagcacagtgtgcccatcggggacgtggccaaggacgggccagggctgatcttcatcatctacccggaagccatcgccacgctccctctgtcctcagcctgggccgtggtcttcttcatcatgctgctcaccctgggtatcgacagcgccatgggtggtatggagtcagtgatcaccgggctcatcgatgagttccagctgctgcacagacaccgtgagctcttcacgctcttcatcgtcctggcgaccttcctcctgtccctgttctgcgtcaccaacggtggcatctacgtcttcacgctcctggaccattttgcagccggcacgtccatcctctttggagtgctcatcgaagccatcggagtggcctggttctatggtgttgggcagttcagcgacgacatccagcagatgaccgggcagcggcccagcctgtactggcggctgtgctggaagctggtcagcccctgctttctcctgttcgtggtcgtggtcagcattgtgaccttcagacccccccactacggagcctacatcttccccgactgggccaacgcgctgggctgggtcatcgccacatcctccatggccatggtgcccatctatgcggcctacaagttctgcagcctgcctgggtcctttcgagagaaactggcctacgccattgcacccgagaaggaccgtgagctggtggacagaggggaggtgcgccagttcacgctccgccactggctcaaggtgtagagggagcagagacgaagaccccaggaagtcatcctgcaatgggagagacacgaacaaaccaaggaaatctaagtttcgagagaaaggagggcaacttctactcttcaacctctactgaaaacacaaacaacaaagcagaagactcctctcttctgactgtttacacctttccgtgccgggagcgcacctcgccgtgtcttgtgttgctgtaataacgacgtagatctgtgcagcgaggtccaccccgttgttgtccctgcagggcagaaaaacgtctaacttcatgctgtctgtgtgaggctccctccctccctgctccctgctcccggctctgaggctgccccaggggcactgtgttctcaggcggggatcacgatccttgtagacgcacctgctgagaatccccgtgctcacagtagcttcctagaccatttactttgcccatattaaaaagccaagtgtcctgcttggtttagctgtgcagaaggtgaaatggaggaaaccacaaattcatgcaaagtcctttcccgatgcgtggctcccagcagaggccgtaaattgagcgttcagttgacacattgcacacacagtctgttcagaggcattggaggatgggggtcctggtatgtctcaccaggaaattctgtttatgttcttgcagcagagagaaataaaactccttgaaaccagctcaggctactgccactcaggcagcctgtgggtccttgtggtgtagggaacggcctgagaggagcgtgtcctatccccggacgcatgcagggcccccacaggagcgtgtcctatccccggacgcatgcagggcccccacaggagcatgtcctatccctggacgcatgcagggcccccacaggagcgtgtactaccccagaacgcatgcagggcccccacaggagcgtgtactaccccaggacgcatgcagggcccccactggagcgtgtactaccccaggacgcatgcagggcccccacaggagcgtgtcctatccccggaccggacgcatgcagggcccccacaggagcgtgtactaccccaggacgcatgcagggcccccacaggagcgtgtactaccccaggatgcatgcagggcccccacaggagcgtgtactaccccaggacgcatgcagggcccccatgcaggcagcctgcagaccaacactctgcctggccttgagccgtgacctccaggaagggaccccactggaattttatttctctcaggtgcgtgccacatcaataacaacagtttttatgtttgcgaatggctttttaaaatcatatttacctgtgaatcaaaacaaattcaagaatgcagtatccgcgagcctgcttgctgatattgcagtttttgtttacaagaataattagcaatactgagtgaaggatgttggccaaaagctgctttccatggcacactgccctctgccactgacaggaaagtggatgccatagtttgaattcatgcctcaagtcggtgggcctgcctacgtgctgcccgagggcaggggccgtgcagggccagtcatggctgtcccctgcaagtggacgtgggctccagggactggagtgtaatgctcggtgggagccgtcagcctgtgaactgccaggcagctgcagttagcacagaggatggcttccccattgccttctggggagggacacagaggacggcttccccatcgccttctggccgctgcagtcagcacagagagcggcttccccattgccttctggggagggacacagaggacagtttccccatcgccttctggttgttgaagacagcacagagagcggcttccccatcgccttctggggaggggctccgtgtagcaacccaggtgttgtccgtgtctgttgaccaatctctattcagcatcgtgtgggtccctaagcacaataaaagacatccacaatggaaaaaaaaaaaggaattcaaaaaaaaa

SEQ ID NO: 8005 - DNA, 1251 bp, Homo sapiens
aaataaacactggggtgtttttgaaaaaccctagaaaagtttcccccctggggtctctctaaagggaatattgagaccttgacgaattaccattaaaaagccattccccgtggggcctaactaatggtgcaatgtgttgtgccaaagtatctaaaacccttctttcttaccttatttttcaagataattctatgtggcaggtattactatctcaattctaagagtgagaaaatggagttttagaaacatttactaacttgcctgggtcacatagctaaggaagaggtggacttgcccagctttgcataaaactcctcaaaagagttgcctatactccctgactccacttatcttcctactatcctctttttaaaatatattatttatttatttaaataagcaatatatgaatgtggtttgaaattcaaaagacacaaagaagtatacagaggaaagcctcactctcaatccttctcaaggtttgctaattcctcttgcataggcaatccgttcttccagctttgtgtttatctttccagagaagtttactgtgtattaagcaaatatgtatatctttattcttgctcagtattttcgcaaacagcagctgtctaagttcactgttctgaactttattttttaaattaaaaatatatggctatgtagtattctattttatggaagttccatatttcatttatcctgtttccttctactgatggctagttaggttattggaagtcttttgctgttgctagttagtcttgtatagacattgtaatgcacatgtgcaaaaatacaagtatgatacaatcttaaaggggagttgctgagtccaatatatacattacaaatattgatagatattgcaaaattgccttcatagaggctatattaatttatagttccagcagcaacatatgagttatctgttctccatatatatatatatattgtatatacccaacagacacgtgttcattttctaaacactgttggaccactcctttctgggtgaaagtacgcatgctatttgtagttatcatgggctttaatatcatcctggtaagtacacgagatctaaaccccaggagatagggcacgactagacattaagcccacacacattacatcgctacatttggacacccacggacataattgcggccccaaccctcaacgagtaataataggggaccctttgattgcgaaaacccttttgtaaggaatctcagccgaaaaaggcaaaac

SEQ ID NO: 8006 - DNA, 5345 bp, Homo sapiens
  misc_feature (937)..(959): n is a, c, g, or t
  misc_feature (2445)..(2468): n is a, c, g, or t
  misc_feature (3460)..(3480): n is a, c, g, or t
  misc_feature (5290)..(5290): n is a, c, g, or t
  misc_feature (5292)..(5292): n is a, c, g, or t
gctgcggcggcacgagggcttctcctgcgcctccttttcgcccagcactagcgccttaggccagctcgggggatgtgagagccgaagcccttagactgccaggcacagagtcgggtcgggatttgtcagccaagcctcggctccagctccgcaatctcgggactcacccgagcgacccaggcccgacggcaagttcgggcgggacggcggccgccgcgcgctcaggctcagcttcgctgcccgcccagaagatgaatccggcctcggcgccccctccgctcccgccgcctgggcagcaagtgatccacgtcacgcaggacctagacacagacctcgaagccctcttcaactctgtcatgaatccgaagcctagctcgtggcggaagaagatcctgccggagtctttctttaaggagcctgattcgggctcgcactcgcgccagtccagcaccgactcgtcgggcggccacccggggcctcgactggctgggggtgcccagcatgtccgctcgcactcgtcgcccgcgtccctgcagctgggcaccggcgcgggtgctgcgggtagccccgcgcagcagcacgcgcacctccgccagcagtcctacgacgtgaccgacgagctgccactgcccccgggctgggagatgaccttcacggccactggccagaggtacttcctcaatcacatagaaaaaatcaccacatggcaagaccctaggaaggcgatgaatcagcctctgaatcatatgaacctccaccctgccgtcagttccacaccagtgcctcagaggtccatggcagtatcccagccaaatctcgtgatgaatcaccaacaccagcagcagatggcccccagtaccctgagccagcagaaccaccccactcagaacccacccgcagggctcatgagtatgcccaatgcgctgaccacttcagnnnnnnnnnnnnnnnnnnnnnnncttcagagaatccagatggagagagaaaggattcgaatgcgccaagaggagctcatgaggcaggaagctgccctctgtcgacagctccccatggaagctgagactcttgccccagttcaggctgctgtcaacccacccacgatgaccccagacatgagatccatcactaataatagctcagatcctttcctcaatggagggccatatcattcgagggagcagagcactgacagtggcctggggttagggtgctacagtgtccccacaactccggaggacttcctcagcaatgtggatgagatggatacaggagaaaacgcaggacaaacacccatgaacatcaatccccaacagacccgtttccctgatttccttgactgtcttccaggaacaaacgttgacttaggaactttggaatctgaagacctgatccccctcttcaatgatgtagagtctgctctgaacaaaagtgagccctttctaacctggctgtaatcactaccattgtaacttggatgtagccatgaccttacatttcctgggcctcttggaaaaagtgatggagcagagcaagtctgcaggtgcaccacttcccgcctccatgactcgtgctccctcctttttatgttgccagtttaatcattgcctggttttgattgagagtaacttaagttaaacataaataaatattctattttcattttctgcaagcctgcgttcttgtgacagattatacagaattgtgtctgcaggattgattatgcagaatacttttctctttcttctctgctgccccatggctaagctttatgggtgttaattgaaatttatacaccaattgattttaaaccataaaaagctgaccacaggcagttacttctgagggcatcttggtccaggaaatgtgcacaaaattcgacctgatttacagtttcaaaaactgtattgatgacagtagtaccaaatgctttaaaaactatttaacttgagctttaaaaatcattgtatggatagtaaaattctactgtatggaatacaatgtaattttgaatccaaaaaaaaaaaaaaaaaaattattagtctgtatttataaaggcacacagtcctattgtagcttatctttcgttatttactgcagagcatctagacaacttagtccctccagcgggaaagtagcagcagcagcattagtcacagttcttacactacagatcttgtgaaagagaccagtttggtactaattatgagcattttattcaaacaaaagtttttgaaatattacaactggggatttaaaaaattgcagcttagaatctgatggttttttttttttcttgatgttgtttgtttgtttttgagatcgagttttgctcttgttgtccaggctggaatgcaatggcacaatctcggctcactgcaacctctgccttctgggttcaagcgattctcctgccttagcctcccgagtagctgggattacaggcgnnnnnnnnnnnnnnnnnnnnnnnnttttgtattttgagtagagacggggtttcaccataatggtcaggctgttctcaaactcctgatctcaggtgatccacccatctcggccttccaaagtgctgggattactggcgtgagccaccgcacccggccttgatgtttattttataaagcactgtaattttgtagctgatgacaaaaggcagccaaatgtttttgataaatcagtggcaactgtatttttgtcttttgaaataactctgaaaacatcaggacaacatagatttcaacctgatagcacaccacacacagtgagctgttgctttttaaattctgaagccttgtcaggtttgcttcctagatttcaagtgtttaaaataattctatctatgaaactgaaggatgaagcagatctctgactgacatgtaaaaaaaaatgccctttgagggtgtatggtggagaataaatgtttcctgaattcagtaaaattgattcctaagtatattaatcctaatcctgtttgctacagttggtataaaaaggcatgaaatatgtattcaatacctcttatgtaaccaaaaccatttttaattagcttttaaggactgagagagcatcatgttcaactggcatgcagtctgcctgcattgccaatgaagtcctcaactgtttaatattttgaactaatattatttataatctatgaatttaatattttttgaaagattttaataatttgagtctatgagaggatactttcaatttccatgggggacttatttgttggggatattaaataagattacttttgatataccggaatataaatgtaaagagtacattggatcatgttggaaagaaggcaagtgaaaaggtaagagatgaagtagagaagttatggaatatagtggaaaggatactagttgtgaaatggaaagagacaagttatagtaccccaaaagcaaaacaagcaggagatgcaagagatgccccaaaaggacaaagcaacaannnnnnnnnnnnnnnnnnnnnaccggaagactatgttgtagaagaaaagaaggctttggtgcaccttatgtgggaggaggaggggcagggcatgctgatgctgagcgtacaggcagacaagagcgtagcctgctgttgcctccatcactatgaaatgacttattttacctgaaggacccatggtttatgttcctctaattcctttcactctccctaagccctctgagagagatgaagatagatgattttattgctactaaattgaagggagcactatttctttttgtcttttgttagcaaaaaattgcaaaaagaattgtacattcttgctaaaaataaataaataaataaaaaattaaaaaaacaagggacctaacaaaactcagcagtgttactgtattttttaaaaatatttttatagactcattttcaggttattaaatgtaagagaaacagatacccctcttttttaaagtaggtaaatcattgatgatttatattaccaatttttagaagtaattttctagtaagcttgtggcatcagaaaatactagaagatttttttagttaaattagttagaacatttatgaatgaatataataaatattttttcagaataaaatatggaccctttgtgtttactaatagataaagccagatataattttttgtttttaaggccacaaaatatggcctttgttaaagaacactaaagttagaaatctaaagttagagcaactttttaatggctatttcctattattgtaagtgttaaaacccctgcagaattcttgataaggtgctatttatactatatttcttattataagataactgtctttagtcttcttagtactagtctttttagtactaaatcaatcagcaaacatcatcatttcaccccaaaattttgtcacagaaaaggcgtatcaaatgaaaaataatttcagagatctttctttcaagatattttttcctgataaaatacattgtcttgaagtaaatacattgtcaaaacctaattgcaattctgttaaatctaagtaatttttagacagtgtttcaccgtattatttaggatgtgaaatgccatttctttcactgattacaccatatacaggaaacaggtaaaacagtgaaaactttattgtgctggttgatgccaacttggttgaaaagctctctgcagaagaagtgatctagactgacagaagtgttgctaattacaagttgtgttctcatgacgtaattagaaagtaacttctcaaagtacaacttttatgaaaaaaataagctgttaaaaaaaggaaatcgtaggttaatttaattgggaaaatgggcaattgacagagaccattttcctaacacatatatgtgctagtactttaactttttaaaattttacttctacgttttgtaatataaaaatttctattttaagtttagaatgttatacgtaccgaaagtatgcagccaaatcgatcagatcaaaccattttacctggagtttggtactggtttttacttctctgaatctgtataagaaaaataaagacaattgaacttccaaagaaaaaaaaaaaaaaaaaaataatagaaaaaagaaaaataatgaaagaagaacaagaaaacaaaggagagagacgaccgagatgaggagtgacggatcagagacacgatagagagccagggaagtatggagagccagacgaaaaagatgaacagggggagtcgggtcatggttaggaacatggttgaaaaaagggggggccccgtgagaaaaacccccgtgagaggggggggcccaaggagggaggacccagcccactncntgtgttgggcaaaagggggggccccccccaaaagagcggcggtattaaaaaca

SEQ ID NO: 8007 - DNA, 3682 bp, Homo sapiens
  misc_feature (129)..(130): n is a, c, g, or t
  misc_feature (658)..(658): n is a, c, g, or t
  misc_feature (3277)..(3277): n is a, c, g, or t
cgggggggggggcttatttgttccgccccgggagaaaaccccgggcccctttgccccattgcccgggaagcccgttgtttggacgcaccgaagccgcggggcggaaattcatcactcccactggtaaannctggcggccgggtgtggaccggggccgcgggatcggccaaaggggggaggctcttgtgcttcgcggggcggaacgcggagagagagaaactagtcttggagtttttttttttttttttttgtggacacaacatgatattaggctttatttgaatttaaaatcttgattccatccagggacattttttaccgaagcgtctcagagactggctcagggtatttcttgacaagactgtacagggcttctcatcatacacaaaccctccacagcccacggctccaacccacagcacctcctgcagtcctggagggaaaagggacagtaacatgaagtgtctgaagatccatttcacctcttttccatgtgaatcatgacgctttcaatgcatttcttgacaggattctattttgaaagaatgatgctcaatctgtaccttttatgcttcttgtttcttctccatcaataatatgtcagtcaactgcttgtcagagacacttagctgctgacaggtccttcataacctgactnaggtaaactgccaagagatgcttgcacaggatgctgtcactcttccgtagcactgagaatgcaaatgcaggacatgaacagtaatgacaagaagccaaacatgtgtatgttttactggaacttccaaggacctggtaaacacgccttccactgggtgatgagattaaggtgatggactgtcgatcaactaggtccaaggcctgggtggctgatgagccaaagatgccccgcccgcgcccatggcgcagccacacacgacctcggtcccgtacttcgcgcgctctcctgcaccgccgccgccatctcgctcaggagctcctccacaaccgccggcaacactacggccatcgcgccgcaggacacgccctccacgaccggcggaccgccgcgacgctccagctgactgcgcctacctgtggaggatcctgaccccccgccggggcagggcgagacggagtgacgtcggggcgcgtcatcgcgcgtgcggacgcagggatgtcctgctcagtcgtcagggcccggccaatccggagggcgctcggcgcgtggtcgggggccaggagcgcgtctggcctgcagtgcgcagaggacgagggcgggagcatgttccggctcctgagctggagcctgggccgaggcttcctgcgggccgcggggcggcggtgccggggctgctccgcgcgcctgctcccggggctggcaggaggtccggggcccgaggtgcaggtgccgccatcccgagtcgcgccgcacggccggggcccaggcctgctgccgctgctggcagcgctcgcctggttctcgaggcccgctgcggcagaggaggaggagcagcagggagccgacggggccgctgccgaggacggggcggacgaggccgaggcagagatcatccagctgctgaagcgagccaagttgagcattatgaaagatgagccagaagaggctgagttaattttgcatgacgctcttcgtctcgcctatcagactgataacaagaaggccatcacttacacttatgatttgatggccaacttagcatttatacggggtcagctttgaaaatgctgaacaaacttttttaaagcaacaatgagttacctccttggagggggcatgaagcaggaggacaatgcaataattgaaatttccctaaagctggccagtatctatgctgcgcagaacagacaggaatttgctgttgctggctatgaattctgcatttcaactctagaggaaaaaattgaaagagaaaaggaattagcagaagacattatgtcagtggaagagaaagccaatacccacctcctcttgggcatgtgcttagacgcctgtgctcgctaccttctgttctccaagcagccgtcacaggcacaaaggatgtatgaaaaagctctgcagatttctgaagaaatacaaggagaaagacacccacagaccattgtgctgatgagtgacctggctactaccctggatgcacagggccgctttgatgaggcctatatttatatgcaaagggcatcagatctggcaagacagataaatcatcctgagctacacatggtactcagtaatctagctgcagttttgatgcacagagaacgatatacacaagcaaaagagatctaccaggaagcactgaagcaagcaaagctgaaaaaagatgaaatttctgtacaacacatcagggaagagttggctgagctgtcaaagaaaagtagacctttgacaaattctgtcagctctaaatccatttttgtgtagggagaataatgtctagtaatgtggaagaatagctatcattcctgtctctgtggcacccgatcaatggcttaaatctgtcgtttttgatattcaggtttcctcaatttagccttagtgaaggaggggttgtacacactgccatttttgtattttaaaggaaaaatgactttcattcccaactgattatgacctttcaggatgtcgtcaagtgatgctttcagttgtaacacgtgacttggtgctgtccctgctggtctaagtagaactgtagattcatatgggctggtgttcctgtgcgctgtgggtgtggtgattcagcctggcatttctaccataagtttttggtctgctgatttgctgccctgtcttctcttactttactttatcaatacctggcaaactgaccagaattaccttcctcatggcaaagggggattatggtgaattgttgttcttatagtctgtttcatgaagcacaagtggaatttaatacataaaagagaaaaatatcttagtttgctaccagcatccagcatgaagttgtaaagtggggattaggcacgtgacagtatagcacccatttgaatttaaataaaagtgaaccatatttatctggttatataaaactaaaaatgggggtgtttatataaaactaaaaactaagaatgatgtaaccttttgtctgtgttatctgaacactctacttcctttgcagccttagtcacacaactgagtcatctcaagtactctttaaggacacacagcccaggctgttctgagtcagaataggcccctacaggtatattttaaaactcttcgtaattctaatgtgtactgctggtatagtgaaaccanccctggatcttagtcctagcctttttgcttttgcaatttcagtatcttcatctctaaactagggaaacactgggattctttcttagctgtgggggaaggtatttggttagatgactttgaatgaatagactgctgtgctgaaagagctttatcacactgtctcaaagtatgtaaagatacataggtggatgctcttactgcagcagtcatgaatacatttttagccatttacctaaggaaaaagacagtttttctaggtaccatgaaggaagattgaccctgttggtatgcctgtgggggtgggatgtgagtgggactgataaactgatacttttggttcgtatgtacatactggaagaatcttcataataaatgagactacacaacaaaaaaaaaaaaaaaaaa

SEQ ID NO: 8008 - DNA, 1150 bp, Homo sapiens
  misc_feature (946)..(950): n is a, c, g, or t
  misc_feature (1103)..(1126): n is a, c, g, or t
atggttggaaggctgtgggtcgggaacccgagcccaaggagtgggggcggcccggagcgaggctcacactccctgccctgcagatgactgtccacaacctgtacctgtttgaccggaatggagtgtgtctgcactacagcgaatggcaccgcaagaagcaagcagggattcccaaggaggaggagtataagctgatgtacgggatgctcttctctatccgctcgtttgtcagcaagatgtccccgctagacatgaaggatggcttcctggccttccaaactagccgttacaaactccattactacgagacgcccactgggatcaaagttgtcatgaatactgacttgggcgtgggacccatccgagatgtgctgcaccacatctacagtgcgctgtatgtggagctggtggtgaagaatcccctgtgcccgctgggccaaactgtgcaaagtgagctctttcgctcccgactggactcctatgttcgctctctgcccttcttctccgcccgggctggctgaagcaacctacctcaagtctcaggagaattcatgtctgcctggggcccttccgaacctgtgccaactaagggcccccactgtaagcccccgcacccccaccccctgcccagagcaacagcctaaaggcctgccctgatgctctcctcctaccagagtgaagcccacagagtccctccacctccacaccaggccctctctccagttttatcccctgcctaatgctgcgagaagcacagaataaactttttgtcactctcaaaaaaaaaaaaaaaaaaaaaaaaacaaagaacaacaacgaacaccaaccggcactctatgggcgagacaacagcaacagcgaccgacatgtccgccgctgagccaacaagctcggcgaagccaagagagaaaaaaccagagacaaatcaagcaaaaaaaaaaaaaannnnnaggggggccccacaaaaaaaacccccccgggaggggccccggataatgcgcgccccctttttttttataaaagagaggcgcctcctttggggggggcgatttattaaaaaagggcggggcgccccctctttttaaaccccgggcggggggggnnnnnnnnnnnnnnnnnnnnnnnntttttgtggaaaagcccttttttt

SEQ ID NO: 8009 - DNA, 2218 bp, Homo sapiens
  misc_feature (2024)..(2192): n is a, c, g, or t
  misc_feature (2209)..(2209): n is a, c, g, or t
tttatctacatgtgacagttttctatcattgggttttttaaaaaatctgtgtattcaactagaacttgagctccacggaggcaggaacttttgttttgtttttcttcactgctcttttcctcgcacctgtctgaagcagtgattttagccagaatctagatttcctgattctggtccagtgctctttccatggttctgtgtgacctcatacatcaaccttatttcacaaacgaggtttttaagttccttgagcacagtcgattgtgttttttactgcttctgctccgtccctgcataagacaggactgtgtcatgtacccagtgatggactcctggtaaataccatggcttgactaaatgacctccagtgctccctgtggtcttcaccaacacgcatcagacgacaggctcagccacgggatacttcgctttctgtaggagtaagagacaagttgctatcactgaacagatacacagtggcatttggaaactgcatgcagtttgaaaaaatcgtgatacagcaggagtctagttttcaataaatagcttattcatattctggattttgaacagttcatgtaactgtaactttggggtagtggataatgagactgaaattaatggttcctctgctggtttccgtctgttttttttttttttctcccaggaggttggtatttctgcacttaaccacctgatgtttttagggggagtatatcccagataaattctgttgtaagtcaaagagcatccatgattggcttggctctttcttaagcaactactaagatgctcctacatttgggtttgaacgttttttattctcttggctatgaagtttcttaagtgactctagtaatactgatggttccccttgtgtttacaggtgatctgcaactctttcaccatctgtaatgcggagatgcaggaagttggtgttggcctatatcccagtatctctttgctcaatcacagctgtgaccccaactgttcgattgtgttcaatgggccccacctcttactgcgagcagtccgagacatcgaggtgggagaggagctcaccatctgctacctggatatgctgatgaccagtgaggagcgccggaagcagctgagggaccagtactgctttgaatgtgactgtttccgttgccaaacccaggacaaggattgttatatgctatctggtgatgagcaagtatggaaggaagttcaagaatccctgaaaaaaattgaagaactgaaggcacactggaagtgggagcaggttctggccatgtgccaggcaatcataagcagcaattttgatcggcttcccgatatcaacatctaccagctgaaggtgctcgactgcgccatggatgcctgcatcaacctcggcctgttggaggaagccttgttctatggtactcggaccatggagccatacaggatttttttcccaggaagccatcccgtcagaggggttcaagtgatgaaagttggcaaactgcagctacatcaaggcatgtttccccaagcaatgaagaatctgagactggcttttgatattatgagagtgacacatggcagagaacacagcctgattgaagatttgattctacttttagaagaatgcgacgccaacatcagagcatcctaagggaacgcagtcagagggaaatacggcgtgtgtctttgttgaatgccttattgaggtcacacactctatgctttgttagctgtgtgaacctctcctattggaaattctgttccgtgtttgtgtaggtaaataaaggcagacatggtttgcaaaccacaagaatcattagttgtagagaagcacgattataataaattcaaaacatttggttgaggatgccaaaaaaaaaaaaaaaggggggcagataaaaaaataatacaataaggaggggccaaagataaagggttaacacaaagttttggtaaaaagggggtcccatatagggagtcgattataagctaggagggccgggttaacaacgtcgtgcgtgggaaaacggtgnnnnnnnnnnnnnnnnnnnnnnnnnnnnnnnnnnnnnnnnnnnnnnnnnnnnnnnnnnnnnnnnnnnnnnnnnnnnnnnnnnnnnnnnnnnnnnnnnnnnnnnnnnnnnnnnnnnnnnnnnnnnnnnnnnnnnnnnnnnnnnnnnnnnnnnnnnnnnnnnnnnnnnnnnccatttcttccgcgtcngataaagca

SEQ ID NO: 8010 - DNA, 1518 bp, Homo sapiens
agcggatggtattttttgacagaggaagaaaaggggtcacaggagaaacatttttttttctgggaaaaatcacttgcttttgacttatgcagttgttttaacacttagtgatgactgtgtattctccaagctgtgatacagcagtttttttttattgtcacagggaaataaatggtaccagaagtccctttcctgttctgtctcttcattgtaatggaagtttcagttgggcatgagcctggagagatgtgactgtctacagttctatttgtatatataaaaagaagactgaaagtcttttgacatggatattgtgaatggtatgaacttttaaaccatattattgatgatgaaaattatttcctgggaactcagtaggaataataccgtattaaggaataatactgtacataaaacatcatgaaaccctagatatgaaatcccctgaagtctgtaatcatggtggttatgttttgtctattcttttgctgtttgtgcctcataaaaagagaatgaggtcttctgctagagcttcgtattgctttggaagttcatctgtgttttatttctccctgaagccctatctttatggcttacttgtaacatgaaagtagtagatgctgccagaaaatagtgtcctcaatattttaaaacaatgttgacatgttttgttcaagtcagcaagctctatgtgagtctcaggaagtgaattaaatttggaccttatgttttactcttgtttttttttttttttttgaatgttacttaatgactctctcctgactcaggagagaaaccccttgtggaaggacagcatggtgatcaggcaatttctctgggttcccaaagaatgacatttgaacacagtattttgaaacagctctagttttcaaattatatctttaatatatagtaatgtaacatattcagtattaatgtataaaaagcactctaattatataattcagtttttgtaaaggtatttgcataaaatttaatatgtcttaaactaattttggtaaattacttcttttttttctttttaataaaaactgttactcattaactttgcttataatgctttttatagcccagcacagaatttaaagccataccaccaaaagtacctggtgtgtgtcaatatgtttttcttggtagcatagattgactatttgcaatagtattagtatttaccatttttccaaattagcaactaccagacctcacgtgttgcgtgataacacaatgctggattcagttttgtgaaactggattctggggcatccaggggatgtttcggggatgatcagctgatagagaggtccagaaggatttaagatcggttcaagcctataatggagggctagcgtggcaagcatgaacgggatggggccttgaccggggagacctctctgctcataaaaacccggaagcccgggctacccagggaaaactcccgcgcggcaaacggccggaaaacaccgtcttgcagaagccgcgaaaaacgagctcgggcag

SEQ ID NO: 8011 - DNA, 2717 bp, Homo sapiens
atgctcctggacgcgggtccgcagttcccggccatcggggtgggcagcttcgcgcgccaccatcaccactccgccgcggcggcggcggcggctgccgccgagatgcaggaccgtgaactgagcctggcggcggcgcagaacggcttcgttgactccgccgccgcgcacatgggagccttcaagctcaacccgggcgcgcacgagctgtccccgggccagagctcggcgttcacgtcgcagggccccggcgcctaccccggctccgctgcggctgccgctgcggccgcagcgctcgggccccacgccgcgcacgttggctcctactctgggccgcccttcaactccacccgggacttcctgttccgcagccgcggcttcggggactcggcgccgggcggcgggcagcacgggctgttcgggccgggcgcgggcggcctgcaccacgcgcactcggacgcgcagggccacctcctcttcccgggcctgccagagcagcacgggccgcacggctcgcagaatgtgctcaacgggcagatgcgcctcgggctgcccggcgaggtgttcgggcgctcggagcaataccgccaggtggccagcccgcggaccgacccctactcggcggcgcaactccacaaccagtacggccccatgaatatgaacatgggtatgaacatggcagcagccgcggcccaccaccaccaccaccaccaccaccaccccggtgcctttttccgctatatgcggcagcagtgcatcaagcaggagctaatctgcaagtggatcgaccccgagcaactgagcaatcccaagaagagctgcaacaaaactttcagcaccatgcacgagctggtgacacacgtctcggtggagcacgtcggcggcccggagcagagcaaccacgtctgcttctgggaggagtgtccgcgcgagggcaagcccttcaaggccaaatacaaactggtcaaccacatccgcgtgcacacaggcgagaaacccttcccctgccccttcccgggctgtggcaaagtcttcgcgcgctccgagaacctcaagatccacaaaaggacccacacaggggagaagccgttccagtgtgagtttgagggctgcgaccggcgcttcgccaacagcagcgacaggaagaagcacatgcacgtccacacctccgataagccctatctctgcaagatgtgcgacaagtcctacacgcaccccagctcgctgcggaagcacatgaaggtccatgagtcctccccgcagggctctgaatcctccccggccgccagctccggctatgagtcgtccacgcccccggggctggtgtcccccagcgccgagccccagagcagctccaacctgtccccagcggcggcggcagcggcggcggcggctgcggcggcggcggccgcggtgtccgcggtgcaccggggcggaggctcgggcagtggcggcgcgggaggcggctcaggcggcggcagcggcagtggcgggggcggcggcggggcgggcggcgggggcggcggcagctctggcgggggcagcgggacagccgggggtcacagcggcctctcctccaacttcaatgaatggtacgtgtgacgggtcggggcctctctccctctccctgtccccaccccagcgcagcagccctccccgcagctagcagcgagggcaccttgtgatcatgttgttaaaattatgaatctgatttttatgatgatgaaaattttaccagcagaaggattttttaaagttttttttttttttttaataataatctaggcatgaagagcaaaaatatcccttccggagtctttgaagctgaaaatataaaacaaataaaaaataaaaaaataaaaacccacaaaaatgttgaaccaaacctccctgctaatctccatgcccacgttctttcccaccctgttcccagtcttctgacaaactgtgtacatagcggactcctcctttctcctccgaggtggttttaaaggctttttggtgtatagaagtttgtccatttgtaaaactccggattgcgttcctccccgccttccgccccttcccttccctaaagtgatgggctttctcttttctctttttagtttacccggtttctttttaagtaatgtggaagaaaatggtttattttgtattgtggtattgaatattgtgttcctttttatgaggcaacctgattgtaaacttcatgtaactatagactggaaaaaatgagccgtgccaaagtctcccttctgtttcttcagcacattgacccatagcacacacatacacaccaccaccaacaacgcttgtgaatgtatttttctgttagctgggtttacatgtgatgttttagtgcttttgcaagttcaatttgttagttcctgtatgaaagattgtgggggaaaaataaacgtcgtgccgttagctttttccgtaataacacccttccttctgtaaatacccgttaccatatttatccatttgtaattaaattatggtattaacttgctacagaggaaacaatatttataaagaatgtttcttaactataaatatgtacaattgtgggcataaactgtttcagattttttatttgaaggttttaagtggtttgatcatttcttgtgatgttttgagagtaatgcatacagaaatataataaaatgtgttgaaactgcaaaaaaaaaaaaaaaaaaaaaaaaaaaaaggggggg

SEQ ID NO: 8012 - DNA, 829 bp, Homo sapiens
  misc_feature (2)..(2): n is a, c, g, or t
  misc_feature (4)..(4): n is a, c, g, or t
  misc_feature (85)..(85): n is a, c, g, or t
  misc_feature (149)..(149): n is a, c, g, or t
  misc_feature (703)..(703): n is a, c, g, or t
  misc_feature (715)..(715): n is a, c, g, or t
  misc_feature (720)..(720): n is a, c, g, or t
  misc_feature (734)..(734): n is a, c, g, or t
  misc_feature (746)..(746): n is a, c, g, or t
  misc_feature (756)..(756): n is a, c, g, or t
  misc_feature (801)..(801): n is a, c, g, or t
  misc_feature (820)..(820): n is a, c, g, or t
gngngtcgggcggggttacccgggaaaccattcatccgtggcctcgggaaatttggggcctaggcgactccttttatagagcccncgggctaccccggcactcggtgaattcagactcctccaagagctgcaaggcccgcatgatctgntgccgtccgctctccaaccccattttcaccccttctccctcgctctgctgcagccagactggcttgctgacagtttctcgaaaacccaccgctcattactctctcaagcacttacttggttccctctgcttggggtgctttgcttccagcgtttcccgggctgcctctttctcatccttcaggtcttagctcaaatgtcacctcctcagagaggccttccctgaccaccatagctaaagttaccattcttaattccattcccttttattctctatcctgattattttcttcatggccccatcacagtttgtaataatgttattaatttgtttctttgcttagtgtctgcttcctccactaaacagaaagctcgatgagggcagggactgtgtctgttttgttccctgctgtatccccagcacctaaggcagtgcctcctaggaagagtattcaataaatatttatcctacgatggaatcaatgaatttaacaatgagtctttggtcacctagccaagggaatggatcgaaccctgccccttatggcaaagattnaggggacagtgncactncgttatcctcaggnatttttaaagantgttccaaangggggtttccatagtgtaatggttagttgggcaccttgggtaatntggaaaaggacttgttctngttttaagt

SEQ ID NO: 8013 - DNA, 5277 bp, Homo sapiens; identical to SEQ ID NO: 5137
  misc_feature (821)..(917): n is a, c, g, or t

SEQ ID NO: 8014 - DNA, 3600 bp, Homo sapiens
ctccaggcaacttggggcaagcgtctcagttctcgctctcccttcctcccagcggggtcgccgcagaccccagccctgggagcaccgctctgcagcgcggccggcgggtggagacggttggcccctaaactcgctcgtccagcccaaccgccccggcggcttctcccagccctcgaggctctcctgagcggcctggagaggcgtcgagcgcagcccagcgcccgcctgctcacccgccccggcccgggaagggaattttcggatcctgcgagcccggggcgcccccgcggcctagggcgggcagctcccggggcctggccgagccggtggcgcccgggaggccgcggggacagcacgcagcgcgcgcccttggatgccgtcccgcagcgacgccccggcccgccccgctcctcctcctgcctggctagcctgcctctcatttgggaagttttgtgggttttctttctcctcctccaaccttggcggaggccacgactcaggcgccacagctgggggctagaggccgcggaccatggtgcggggcagccaccgctgaagtcagcaaaaccgagcctggcctgaggcaggctgcgcgggaggccaaagccatggccattgccacgtcgacccagctggcccgggcactgtatgacaacaccgctgagtccccccaggagctgtccttccgccgaggggatgtcctacgggtcctgcagagagagggcgctggtggactggacggctggtgcctctgctccctacacggccagcagggcattgtgcccgccaacagggtgaagctcttgcctgctggcccagcacccaagcccagcctctctcctgcgtccccagcccagcctggctcaccatatccagccccagatcacagcaatgaggaccaggaggtgtatgtggtgccgcccccagctcggccctgtccaacctcaggacctccagctggaccttgcccaccctctcctgacctcatctacaaaatccccagagctagtgggacccagctggctgctcccagagatgccttggaggtctacgatgtgccccccaccgccctccgggtgccctccagtggcccctatgactgccctgcctccttttcccaccctctgacccgggttgccccgcagccccctggagaggatgatgctccctatgatgtgcctctgaccccaaagccacctgcagagctggaaccagatctggagtgggaaggaggccgggagccggggccccccatctatgctgccccctccaacctgaaacgagcgtcagccttactcaatttgtatgaagcacccgaggaactgctggcagacggggagggcgggggcactgatgaggggatctacgatgtgcctctgctggggccagaggctcccccttctccagagccccctggagccttggcctcccatgaccaggacaccctggcccagcttctggccagaagccccccacccccacacaggccccggctcccctcagctgagagcctgtcccgccgccctctgcctgccctgcctgtccctgaggcccccagcccctccccagtgccctctcctgccccaggccggaagggcagcatccaggaccggcctctgcccccacccccaccccgcctgcctggttatggaggccccaaggtcgagggggatccagagggcagggagatggaggatgacccagcaggacaccacaatgagtacgagggcattccgatggccgaggagtatgactatgtccacctgaagggcatggacaaagctcagggatctaggcccccggatcaggcctgcacaggggatcctgaactgcccgagagggggatgccggcgccgcaggaggccctgtccccaggggagccactggttgtgtccaccggagatctgcagctcctgtacttctatgctgggcaatgccagagccactactcagccctgcaggcagccgtggcagccctgatgtccagtacccaggctaatcagcccccgcgccttttcgtgccccacagcaagagggtggtggtggctgctcatcgcctggtgtttgttggggacaccctgggccggctggcagcctctgcccctctgagagcacaggtcagggctgcaggtacagcactgggccaggcattgcgggccactgtgctggctgtcaagggagctgccctgggctacccatccagccctgccatccaagagatggtgcagtgtgtaacagaactggcagggcaggccctgcaattcactaccctgctcactagcctggctccatgaaggtcctttggcacagctctgctcctcccctgcctgccaaagcccccctttaggccttgggtggctggaaggctttgttaagggactaggagaaatgggggtatctttcccctttcctgccctttctgctcatctcaacctctcacagaggtgtcttctccccctaacctacagctttttgtacaagccattttgtgtaaattatttatatttaatattattccctgctttgtcaggagcaggtactaggctctggggcagtgaggaactagatccttctctcctcagcctagggtggaggtcactgcactaccacccacctctggaagactggctgtgaaaagtcaggtggcagaaacctggggccacatagagcctctctcttttcctgtttcttggctctagaagatcagcactgcactgttagctgagagtgcgggcaagacataaactgtccagagtttgaaggttctcggaaagaccggagggcttctccccacagaaggcggagagagctggggctcagacatgggtgtgcaccttaataaaccctgctgtctgcctccctgactctgcttcttgggagcatggtgagcagccctggtgctcagcagccatacctatgggacacacactacgaaaaggatgcctttagggtttgggggagattttactcctttcttcaacaactattcactggacaagttctctgctcccatgacgcgccaggcacagttctgcaagtatattgtgaatgtattgttctagtgggatacacaaataagtcagttaaaatacataaataaaaacataaacctgccataaaaaaaaaaaaaaaaggtgatggacgtcggcaggatgatttgaagaaactaactagatgaggggagagggcagtgaaggagactttagacaggatggttgggaggtgagatctgaactgaaacccagaggaggagagtctgaggactagtgttcccagaaggcaaatgccgatgactgacctgagggccttccctccaaaattccttggccttatgatgtcctttaaagaaggtggccaatgcggccgaagaaattgaccccccttagggccctttgaaattgggcccttccccggcagaggcccaccccccacctaagagggccccaagctcccaccctttggccccccccccggggataaacccccgggggtcccacctcgcggaaaaaccgcccccgcccggggacccaacccctcaagggaggacccctccgccttcctcccatacggggggcagctaaccacacacgagcagccagt

SEQ ID NO: 8015 - DNA, 2168 bp, Homo sapiens
cccacgcgtccgcccaagcccctgggctagcctctgggccggcgcctaggccggccaacgcggacgccgggttgcggtgattcccagcggcgagtcctcaaccactgaagaagaagcttgatgcttggctgtcagaagacatgaattacgcacggttcatcacggcagcgagcgcagccagaaacccttctcccatccggaccatgagtgagaaacgggctgacatattgagcagaggaccaaaatcgatgatctccttggctggtggcttaccaaatccaaacatgtttccttttaagactgccgtaatcactgtagaaaatggaaagaccatccaatttggagaagagatgatgaagagagcacttcagtattctccgagtgctggaattccagagcttttgtcctggctaaaacagttacaaataaaattgcataatcctcctaccatccattacccacccagtcaaggacaaatggatctatgtgtcacatctggcagccaacaaggtctttgtaaggtgtttgaaatgatcattaatcctggagataatgtcctcctagatgaacctgcttattcaggaactcttcaaagtctgcacccactgggctgcaacattattaatgttgccagtgatgaaagtgggattgttccagattccctaagagacatactttccagatggaaaccagaagatgcaaagaatccccagaaaaacacccccaaatttctttatactgttccaaatggcaacaaccctactggaaactcattaaccagtgaacgcaaaaaggaaatctatgagcttgcaagaaaatatgatttcctcataatagaagatgatccttactattttctccagtttaacaagttcagggtaccaacatttctttccatggatgttgatggacgtgtcatcagagctgactctttttcaaaaatcatttcctctgggttgagaataggatttttaactggtccaaaacccttaatagagagagttattttacacatacaagtttcaacattgcaccccagcacttttaaccagctcatgatatcacagcttctacacgaatggggagaagaaggtttcatggctcatgtagacagggttattgatttctatagtaaccagaaggatgcaatactggcagctgcagacaagtggttaactggtttggcagaatggcatgttcctgctgctggaatgtttttatggattaaagttaaaggcattaatgatgtaaaagaactgattgaagaaaaggccgttaagatgggggtattaatgctccctggaaatgctttctacgtcgatagctcagctcctagcccttacttgagagcatccttctcttcagcttctccagaacagatggatgtggccttccaggtattagcacaacttataaaagaatctttatgaagaaattaaactaggttgggcatggtggctcacacctataatcccagcactttgggaggcagaggagggaggatcacttgaacccaggaattcaaggctgcagtaagctacgatcacaccactgcactctggcctgcatgcactctggcctgcatggcagaacaagaccctgtctctaaaaaaagagaaagaaatcaaactaatcatgctgctcatggatttttccaataaatttcttgttttggcaggaagaaatgaacactggtattagacttaaagattaaatttcctcaaacatgtcctatctgtagtagttcaactagacaccttttaaagtgcctctaaattcatcagatggccaaactgtatttataatccacttaggcattttgaaaaactttcaacctgtaaaaagttacttttatcttggatttattatgaagaactttgtagttgctttgtaatttcccataaattgtctttgaaactaacattttacactgaattattttgagattttaaagaagtaattaagtgcaaaatggtatataatgtgtactttttctacttttaggaaaatttaatgagagcttattgcaaaaattgttataatttggtcattataagtgacttttagtaaaagtaccataaaccttatgttatgccacagaaattcctttaaaataaaattcttaaactaaacataaaaaaaaaaaaaaaagatacttggacctacgg

SEQ ID NO: 8016 - DNA, 4244 bp, Homo sapiens
  misc_feature (1386)..(1404): n is a, c, g, or t
  misc_feature (2184)..(2199): n is a, c, g, or t
ggacgaggtcttcttcaacagcgaggtggacgagaaagtgggcccgcgccgcccgccgcgaagctgaggccgccgcccgagggcagcgcgggggcctgcgccccggtgcccgccgccgccgccgtcgccgcggggcccgagcccgcccccgccggccccgccaagcccgccggccccgccgcgctggccgcccgcgccggccccggccccgggcccggccccggccccggccccggccctggcaagcccgccggccccggcgccgcgcaaactttgaatgggagcgccgcgctgctgaactcgcaccacgccgccgcacctgctgtcagcctggtcaacaacgggcccgccgcgctgctgccgctgcccaagcccgccgcccccgccgccgccccgcccccgccaccccccgcgcccgccactctggcccggccgcccggccaccccgccggacccccgaccgccgcgctcgccgtgccgccccccgccgccgcccagaacgggggcagcgccggggcagcccccgcccccgccccggccgccgggggccccgcgggggtcagcggccaacccgggcccggcgcggcggctgcggcgccggcgccgggggtcaaggccgagtcgcccaagagggtggtgcaggcggcgcccccggcggcgcagaccctggcggccagcggcccggccagcacggcggccagcatggtcatcgggccaactatgcaaggggcgctgcccagcccggccgccgtcccgccgcccgcccccgggacccccaccgggctgcccaaaggcgcggccggcgcagtgacccagagcctgtcccggacgcccacggccaccaccagcgggattcgggccaccctgacgcccaccgtgctggccccccgcttgccgcagccgcctcagaacccgaccaacatccagaacttccagctgcccccaggaatggtcctcgtccgaagtgagaatgggcagttgttaatgattcctcagcaggccttggcccagatgcaggcgcaggcccatgcccagcctcagaccaccatggcgcctcgccctgccacccccacaagtgcccctcccgtccagatctccaccgtacaggcacctggaacacctatcattgcacggcaggtgaccccaactaccataattaagcaagtgtctcaggcccagacaacggtgcagcccagtgcaaccctgcagcgctcgcccggcgtccagcctcagctcgttctgggtggcgctgcccagacggcttcacttgggacggcgacggctgttcagacggggactcctcagcgcacggtaccaggggcgaccaccacttcctcagctgccacggaaactatggaaaacgtgaagaaatgtaaaaatttcctnnnnnnnnnnnnnnnnnnntggcttcatctggcaagcagtctacagagacagcagctaatgtgaaagagctcgtgcagaatttactggatggaaaaatagaagcagaagatttcacaagcaggttataccgagaacttaattcttcacctcaaccttaccttgtgcctttcctgaagaggagcttacccgccttgagacagctgacccccgactccgcggccttcatccagcagagccagcagcagccgccaccgcccacctcgcaggccaccactgcgctcacggccgtggtgctgagtagctcggtccagcgcacggccgggaagacggcggccaccgtgaccagtgccctccagccccctgtgctcagcctcacgcagcccacgcaggtcggcgtcggcaagcaggggcaacccacaccgctggtcatccagcagcctccgaagccaggagccctgatccggcccccgcaggtgacgttgacgcagacacccatggtcgccctgcggcagcctcacaaccggatcatgctcaccacgcctcagcagatccagctgaacccactgcagccagtccctgtggtgaaacccgccgtgttacctggaaccaaagccctttctgctgtctcggcacaagcagctgctgcacagaaaaataaactcaaggagcctgggggaggttcgtttcgggacgatgatgacattaatgatgttgcatcgatggctggagtaaacttgtcagaagaaagtgcaagaatattagccacgaactctgaattggtgggcacgctaacgcggnnnnnnnnnnnnnnnnccttcctcctccaagcgcctttgcagagaagaatattagaaataggtaaaaaacatggtataacggaattacatccagatgtagtaagttatgtatcacatgccacgcaacaaaggctacagaatcttgtagagaaaatatcagaaacagctcagcagaagaacttttcttacaggatgacgacagatatgagcaggcgagtgacgtccgggcacagctcaagttttttgaacagcttgatcaaatcgaaaagcagaggaaggatgagcaggagcgggagatcctgatgagggcagcaaagtctcggtcaagacaagaagatccagaacagttaaggctgaaacagaaggcaaaggagatgcagcaacaggaactggcacaaatgagacagcgggacgccaacctcacagcactagcagcgatcgggcccaggaaaaagaggaaagtggactgtccggggccgggctcaggagcagaggggtcgggccccggctcagtggtcccaggcagctcgggtgtcggaacccccagacagttcacgcgacaaagaatcacgcgggtcaacctcagggacctcatattttgtttagaaaatgaacgtgagacaagccattcactgctgctctacaaagcattccttaagtgacacaggaggacgcctggggactttttatatatttgcagattacgcctttttgtaacgagcaaatgggatattgtttaaaaaacagccacctctttacaatggaacagttttatattcctgtttctaaatcagctcttcagtgtgaaagaaaacacgtttctgtaacagagagaacacaaaggcctgtggatactcttaaaggacaattaaatcttaactcatcttgattgagtggccttcctgccaaacaagccatatataaagactgatggaatcgttagcaaataattagctgccctctgtcaactcatagcagtttctgcattatttgtgcattttggtttagttctacctaacttactatgtaggtgtatgtctacagccgatgacctcatttcgtttattttatttttgtaatagtcagttggcaaagcaaactgattttttagactatttatcttccttcccttcccctcccaccccgctctcctctctgccccctgccctcccctcccctcccttcccctccactccgctgagaatcctggaggaatacacaattcatcgttgcacccccacctcagagtgtaatcgcatttctgcttggtagaggccgagcccagcaaaggtggctccttctgaatgtgtggtcagcatctgtacaaatgcattttatttgctatagtttgtaaagctgtaaagttaaaagagatgaaaaccttttcagcataaatatattttacttgcactgtgttttttagctaaaagtgaaaacctagattaaataaaatcaaagttgagaagaatcatcaaaagactgtttctcggtgtgaatcaagtgttgaaaaatggttggtgtattttgtcagtaattgtacataacttttggcacatgacatagaaatggctatgtaaactataattattttgctaagagactgtatgcaagccttgggccgactttacagacgtccagagcaaagccccttctttgtacctatttttttattacaaatatactaattggttctttctattttcagaggttattgtatgaaattgtctattgatagtacttttatgactgtaaatactctggctttctccgtgtgaattctcacattagactttaattcgagcgcgtgtgaactgaacgctgatcagtattttttatcaacacctgagaactgttacaccttttattttgtcttttaggaaatccctgtctttccattttttcatgtaaattttgcacagttacttgttcatatgtaaatattttactttcagaaatgaagtttttaattgctattgttttatataggattgaaagaaaattaactcctttattaaaaacaaatttatctgtaaaaaaaaaaaaaaaaaaaaaaaaaaaaaa

SEQ ID NO: 8017 - DNA, 6592 bp, Homo sapiens
  misc_feature (588)..(603): n is a, c, g, or t
  misc_feature (3033)..(3058): n is a, c, g, or t
  misc_feature (6379)..(6438): n is a, c, g, or t
aattccggtccctgggctgctggtcttctttaccttccagctgctcacagaacagagagtttctacatacaagcagaagatgtgaaaatattgggaataaataaagtatatgcttataaacaagttgtggctgctcctggttacgttgtgcctgaccgaggaactggcagcagcgggagagaagtcttatggaaagccatgtgggggccaggactgcagtgggagctgtcagtgttttcctgagaaaggagcgagaggacgacctggaccaattggaattcaaggcccaacaggtcctcaaggattcactggctctactggtttatcgggattgaaaggagaaaggggtttcccaggccttctgggaccttatggaccaaaaggagataagggtcccatgggagttcctggctttcttggcatcaatgggattccgggccaccctggacaaccaggccccagaggcccacctggtctggatggctgtaatggaactcaaggagctgttggatttccaggccctgatggctatcctgggcttctcggaccacccgggcttcctggtcagaaaggatcaaaaggtgaccnnnnnnnnnnnnnnnntagtttcaaaggaattaagggggatcctgggctgcctggactggatggaatcactggcccacaaggagcacccggatttcctggagctgtaggacctgcaggaccaccaggattacaaggtcctccagggcctcctggtcctcttggtcctgatgggaatatggggctaggttttcaaggagagaaaggagtcaagggggatgttggcctccctggcccagcaggacctccaccatctactggagagctggaattcatgggattccccaaagggaagaaaggatccaagggtgaaccagggcctaagggttttccaggcataagtggccctccaggcttcccgggccttggaactactggagaaaagggagaaaagggagaaaagggaatccctggtttgccaggacctaggggtcccatgggttcagaaggagtccaaggccctccagggcaacagggcaagaaagggaccctgggatttcctgggcttaatggattccaaggaattgagggtcaaaagggtgacattggcctgccaggcccagatgttttcatcgatatagatggtgctgtgatctcaggtaatcctggagatcctggtgtacctggcctcccaggccttaaaggagatgaaggcatccaaggcctacgtggcccttctggtgtccctggattgccagcattatcaggtgtcccaggagccctagggcctcagggatttccagggctgaagggggaccaaggaaacccaggccgtaccacaattggagcagctggcctccctggcagagatggtttgccaggcccaccaggtccaccaggcccacctagtccagaatttgagactgaaactctacacaacaaagagtcagggttccctggtctccgaggagaacaaggtccaaaaggaaacctaggcctcaaaggaataaaaggagactcaggtttctgtgcttgtgacggtggtgttcccaacactggaccacccggggaaccaggcccacctggtccatggggtctcataggccttccaggccttaaaggagccagaggagatcgaggctctgggggtgcacagggcccagcaggggctccaggcttagttgggcctctgggtccttcaggacccaaaggaaagaagggggaaccaattctcagtacaatccaaggaatgccaggagatcggggtgattctggctcccagggcttccgtggtgtaataggagaaccaggcaaggacggagtaccaggtttaccaggtctgccaggccttccgggtgatggtggacagggcttcccaggtgaaaaggggttacctggacttcctggtgaaaaaggccatcctggtccacctggcctcccaggaaatgggttaccaggacttcctggaccccgtgggcttcctggagataaaggcaaggatggattaccgggacaacaaggccttcccggatctaagggaatcaccctgccctgtattattcctgggtcatacggtccatcaggatttccaggcactcccggattcccaggccctaaagggtctcgaggcctccctgggaccccaggccagcctgggtcaagtggaagtaaaggagagccagggagtccaggattggttcatcttcctgaattaccaggatttcctggacctcgtggggagaagggcttgcctgggtttcctgggctccctggaaaagatggcttgcctgggatgattggcagtccaggcttacctggttccaagggagccactggtgacatctttggtgctgaaaatggtgctccgggggaacaaggcctacaaggattaacagggcacaaaggatttcttggagactctggccttccaggactcaagggtgtgcacgggaagcctggcttactaggccccaaaggtgagcggggcagccctgggacaccaggacaggtgggacagccaggcaccccaggatctagtggtccatatggcatcaagggcaaatctgggctcccaggagcaccaggcttcccaggcatctcaggacatcctggaaagaaaggaacaagaggcaagaaaggtcctcctggatcaattgtaaagaaagggctgccagggctaaaaggccttcctggaaatccaggcctagtaggactgaaaggaagcccaggctctccaggggtcgctgggttgccagccctctctggacccaagggagagaaggggtctgttggattcgtaggttttccaggaataccaggtctgcctggtattcctggaacaagaggattaaaaggaattccaggatcaactggaaaaatgggaccatctggacgcgctggtactcctggtgaaaagggagacagaggcaatccggggccagtcggaatacctagtccaagacgtccaatgtcaaacctttggctcaaaggagacaaaggctctcaagnnnnnnnnnnnnnnnnnnnnnnnnnngggccaagaggtgacaaaggagaggctggtcgacctggaccaccaggcctacctggagctcctggcctcccaggcattatcaaaggagttagtggaaagccagggccccctggcttcatgggaatccggggtttacctggcctgaaggggtcctctgggatcacaggtttcccaggaatgccaggagaaagtggttcacaaggtatcagagggtcgcctggactcccaggagcatctggtctcccaggcctgaaaggagacaacggccagacagttgaaatttccggtagcccaggacccaagggacagcctggcgaatctggttttaaaggcacaaaaggaagagatggactaataggcaatataggcttccctggaaacaaaggtgaagatggaaaagttggtgtttctggagatgttggccttcctggagctccaggatttccaggagttgccggcatgagaggagaaccaggacttccaggttcttctggtcaccaaggggcaattgggcctctaggatcccccggattaataggacccaaaggcttccctggatttcctggtttacatggactgaatgggcttccgggcaccaagggtacccatggcactccaggacctagtatcaccggtgtgcctgggcctgctggtctccctggacccaaaggagaaaaaggatatccaggaattggcatcggagctccagggaagccgggcctgagagggcaaaaaggtgatcgaggtttcccaggtctccagggccctgctggtctccccggtgccccaggcatctccttgccctcactcatagcaggacagcctggtgaccccgggcgaccaggcctagatggagaacgaggccgcccaggccccgctggacccccaggtccccctgggccatcctcgaatcaaggcgacaccggagaccctggcttccctggaattcctggacctaaagggcctaagggagaccaaggaattccaggtttttctggcctccctggagagctaggactgaaaggcatgagaggtgagcctggcttcatggggactccaggcaaggttgggccacctggagacccaggatttcccggaatgaaggggaaggcagggccaagaggctcttctggcctccaaggtgatcctggacaaacaccaactgcagaagctgtccaggttcctcctggacccttgggtctaccagggatcgatggcatccctggcctcactggggaccctggggctcaaggccctgtaggcctacaaggctccaaaggtttacctggcatccccggtaaagatggtcccagtgggctcccaggcccacctggggctcttggtgatcctggtctgcctggactgcaaggccctccaggatttgaaggagctccagggcagcaaggccccttcgggatgcctggaatgcctggccagagcatgagagtgggctacacgttggtaaagcacagccagtcggaacaggtgcccccgtgtcccatcgggatgagccagctgtgggtggggtacagcttactgtttgtggaggggcaagagaaagcccacaaccaggacctgggctttgctggctcctgtctgccccgcttcagcaccatgcccttcatctactgcaacatcaacgaggtgtgccactatgccaggcgcaatgataaatcttactggctctccactaccgcccctatccccatgatgcccgtcagccagacccagattccccagtacatcagccgctgctctgtgtgtgaggcaccctcgcaagccattgctgtgcacagccaggacatcaccatcccgcagtgccccctgggctggcgcagcctctggattgggtactctttcctcatgcacactgccgctggtgccgagggtggaggccagtccctggtctcacctggctcctgcctagaggactttcgggccactcctttcatcgaatgcagtggtgcccgaggcacctgccactactttgcaaacaagtacagtttctggttgaccacagtggaggagaggcagcagtttggggagttgcctgtgtctgaaacgctgaaagctgggcagctccacactcgagtcagtcgctgccaggtgtgtatgaaaagcctgtagggtggcacctgccactctgccccttgccctcccctgcccctcacaacagtcacctcacaaacctgaatggtctgaagaaggaaggcctgagcccctttgctgatcaagttgtacattggagtctcatttgggctagactaccggacactcgtcaccccagccctcgggtccatagagatgagcccaccctgctgagatctgctgtcctgtttctgtcaagctggtgctactgtttgatttggatgattgtgtgactattcatggctacctcagaaagatttgatgggccacaactgtcttagactgctagctttctccttaccgtcttgatcggaaagctcttcctaatcgctaatcagtcatttcttcatgtacagaggtcagcacacattatttggtttaaaccagaacccagtgtttccacacttaaattctctaaccgaatattcatggatggctcaagtctgcacagagcaagtcctcactcttcaaggaggcccacttgtgtcttaggcaggcaagagaattgaaatgagggtgccacccaagtagcccagagtgagctttagctctctctagaatgagcaagactgggccccacatggcttagagaggcttgaaggccagcagctgggttgggggtggtggtcattaatggcatatggtcctagacaaaccatctcctccttgccggctccccctccagccagagacagaggatgtggcctggttcaaagtaaagcagaggatgcaacaaatgtggccaagcctatcaaaggaaatgagaatgacagccttttttcctgggccagaagtagaggggtgggtgcgtaaggatgtgtgagttttgcttttgactccaggaacaaaaaggtaaatcccacatcccagtttctcagaagtccctgtttattccaaatgccatccagatgtgtgcaatgtggcaaactgaagctgcacagtgttggtttccttgtattctgaggatgttaaagactttgttaaatggttatccaattgctctttcacaggtagcctattaaactattttaatatgtttttttaaacctcataaaaatctagcacactcttctcttgagcagttagcagacctaaagcaagcctgaattggctatgcagtacattgtattctgtttgggggaatttgttttagccattttctttaattaccannnnnnnnnnnnnnnnnnnnnnnnnnnnnnnnnnnnnnnnnnnnnnnnnnnnnnnnnnnntccttaagtattatataaactgtgccaatacagacaaagcataatcaatataatctgaattattgttatctttacctcctgagtaataagcatggtgtcagttttgtacatagcaaataaaataaatgaaatctgaaaaaaaaaaaaaaaaaaa

SEQ ID NO: 8018 - DNA, 1938 bp, Homo sapiens
  misc_feature (442)..(462): n is a, c, g, or t
tctggagccaagtaatggtgatactgatgcttccttttctttgccgcgctcggattctgagtttcacaagaatgtacctgggtgccccttagcgggatatgaatagcttcttcggaaccccagcggccagctggtgcctcctggaaagtgacgtctcatctgcaccggacaaggaggcggggagggagcgcagagcactcagcgtccagcagcgcggcgggccagcctggagcggaagcctggagtggagcaggcagtccgcgggggacagacgtcggctgggattgagccggcagactgcgaaaagtagctggagccggagcagggacagaacctgttgctgcagacgggcttggttgattctgcgttcctgcttctcttctggtctcgatgttagaggttcatcatgaatgagaaatgggacacaaactcttcagaaaannnnnnnnnnnnnnnnnnnnncaatgacacaaagcatcatctgtactcagatattaatattacctatgtgaactactatcttcaccagcctcaagtggcagcaatcttcattatttcctactttctgatcttctttttgtgcatgatgggaaatactgtggtttgctttattgtaatgaggaacaaacatatgcacacagtcactaatctcttcatcttaaacctggccataagtgatttactagttggcatattctgcatgcctataacactgctggacaatattatagcaggatggccatttggaaacacgatgtgcaagatcagtggattggtccagggaatatctgtcgcagcttcagtctttacgttagttgcaattgctgtagataggttccagtgtgtggtctacccttttaaaccaaagctcactatcaagacagcgtttgtcattattatgatcatctgggtcctagccatcaccattatgtctccatctgcagtaatgttacatgtgcaagaagaaaaatattaccgagtgagactcaactcccagaataaaaccagtccagtctactggtgccgggaagactggccaaatcaggaaatgaggaagatctacaccactgtgctgtttgccaacatctacctggctcccctctccctcattgtcatcatgtatggaaggattggaatttcactcttcagggctgcagttcctcacacaggcaggaagaaccaggagcagtggcacgtggtgtccaggaagaagcagaagatcattaagatgctcctgattgtggccctgctttttattctctcatggctgcccctgtggactctaatgatgctctcagactacgctgacctttctccaaatgaactgcagatcatcaacatctacatctacccttttgcacactggctggcattcggcaacagcagtgtcaatcccatcatttatggtttcttcaacgagaatttccgccgtggtttccaagaagctttccagctccagctctgccaaaaaagagcaaagcctatggaagcttatgccctaaaagctaaaagccatgtgctcataaacacatctaatcagcttgtccaggaatctacatttcaaaaccctcatggggaaaccttgctttataggaaaagtgctgaaaaaccccaacaggaattagtgatggaagaattaaaagaaactactaacagcagtgagatttaaaaagagctagtgtgataatcctaactctactacgcattatatatttaaatccattgctttttgtggctttgcacttcaaatttttcaaagaatgttctaaataaaacatttactgaaagccctctctggcaaaaaaattaaaaataaacaaaaatggtcataagatcataaacaatcttatgttgtataaaaatacgtagagtgacttagacatgtttgcatgaataaatatatttctagagaacagttaaaaaaaaaaaaaaaaaaaa

SEQ ID NO: 8019 - DNA, 3021 bp, Homo sapiens; identical to SEQ ID NO: 6974

SEQ ID NO: 8020 - DNA, 2977 bp, Homo sapiens
  misc_feature (1035)..(1200): n is a, c, g, or t
  misc_feature (1218)..(1237): n is a, c, g, or t
  misc_feature (1680)..(1711): n is a, c, g, or t
  misc_feature (1714)..(1714): n is a, c, g, or t
  misc_feature (2239)..(2277): n is a, c, g, or t
gcttactccctgaccagatgctgcggtgcacggggcagccaccatctctgcatgcatgtctgtgtaagtgtctctctctctgtgtgtatgtgcctctgtcatttcgtgtcaaaggtacattacctgattacctttctcggctgccagatttttatctagataattggaactgctatggaggctgtgccttgccagccagcttagaatctgtaaagccatagtttgtccaccttgttatctgtggctgcctgggcagaggaaattaaagagatccacagccaggggggcgcttcctactcctgacctccccagcgatcccaaacaggacagtttgttagtaccgtctttttgtttttatgttttgatttcgttttgggtttttgttcgctcgtgtatgttattttggcatgtggatacctattcccctccacatcgcacatcgtgttttatggagtttagagctgaggaaactttggtcgggttgccaggacgttcgcaccactttgcggaaagcacgagctaacagtgagaccgacagagatgtcttccaagcgaccagcctctccgtatggggaagcagatggagaggtagccatggtgacaagcagacagaaagtggaagaaaaggagagtgacgggctcccagcctttcaccttcccttgcatgaagttgatggcaataaagttatgtcttcatttgccccacacaactcatctacctcacctcagaaggcagaagaaggtgggcgacagagtggcgagtccttgtctagtacagccctgggaactcctgaacggcgcaagggcagtttagctgatgttgttgacaccttgaagcagaggaaaatggaagagctcatcaaaaacgagccggaagaaacccccagtattgaaaaactactctcaaaggactggaaagacaagcttcttgcaatgggatcggggaactttggcgaaataaaagggactcccgagagcttagctgagaaagaaaggcaactcatgggtatgatcaaccagctgaccagcctccgnnnnnnnnnnnnnnnnnnnnnnnnnnnnnnnnnnnnnnnnnnnnnnnnnnnnnnnnnnnnnnnnnnnnnnnnnnnnnnnnnnnnnnnnnnnnnnnnnnnnnnnnnnnnnnnnnnnnnnnnnnnnnnnnnnnnnnnnnnnnnnnnnnnnnnnnnnnnnnnnnnnnnnatccaggttcaaggtcannnnnnnnnnnnnnnnnnnnccgtattccctcctgatcaacggacactggctgcagctgcccagcaaggattcctcctccctccaggcttcagctataaggctggatgtagtgacccttaccctgttcagctgatcccaactaccatggcagctgctgccgcagcaacaccaggcttaggcccactccaactgcagcagttatatgctgcccagctagctgcaatgcaggtatctccaggagggaagctgccaggcataccccaaggcaaccttggtgctgctgtatctcctaccagcattcacacagacaagagcacaaacagcccaccacccaaaagcaaggatgaagtggcacagccactgaacctatcagctaaacccaagacctctgatggcaaatcacccacatcacccacctctccccatatgccagctctgagaataaacagtggggcaggcccnnnnnnnnnnnnnnnnnnnnnnnnnnnnnnnngtncttcagccagagttagcacaataggttacttaaatgaccatgatgctgtcaccaaggcaatccaagaagctcggcaaatgaaggagcaactccgacgggaacaacaggtgcttgatgggaaggtggctgttgtgaatagtctgggtctcaataactgccgaacagaaaaggaaaaaacaacactggagagtctgactcagcaactggcagttaaacagaatgaagaaggaaaatttagccatgcaatgatggatttcaatctgagtggagattctgatggaagtgctggagtctcagagtcaagaatttatagggaatcccgagggcgtggtagcaatgaaccccacataaagcgtccaatgaatgccttcatggtgtgggctaaagatgaacggagaaagatccttcaagcctttcctgatcttggatttttgtgtgtatgtatgtatgtgattatggtactaataataggaataacgttggaccattgtgagttaaacccacatctggggatgaaatcccacnnnnnnnnnnnnnnnnnnnnnnnnnnnnnnnnnnnnnnnttgactttgcacttcaaatgacaacttaaccaagtatagggctcagaaattatatttttaaatgtctgattattattggatggatcaggtggccctgtgtaatagaggtgtgcatgtataacatggaagctactagcaaactgctcccagatgtcctttctccctggtcagttggttccattaacgtttgctacttagtgatttttgtttttcctgttgatattttgagcaaaacaatcattgttttcattgaatatatttggccattttttcagacaaatagaattagcttatttcttcaacattccatcctttcccgatcaggaaatgaaactgatgattttataaggtatttttcacccctccatgaagtgaggtggaggcctttagcatttcagaagtgtgggccatatgtagttcatgccataaaaagtaggatttaattaaaagtcattgcagcccaataaaatggagcctggctgcacccagggatccttgccactgctcttcccttgctgtcagattaatccactgaagtccaactttggttcaagcagagtatttgcaaagagcaacaactgaatgtgatgggactgcttatgtagattttgccagccaaatgccaaggcagttgtagggcctgtacaaataaatgcaaaatcatttcaagtcaattgccattatttgtattgaagtatca

SEQ ID NO: 8021 - DNA, 740 bp, Homo sapiens
ttttttttttttttttctgtaactttaagagcatgaactcatcctaatgaggtttgacagcagctttgtcacacattagatgtttcctcagctgtaaactgggtcagaagcttggagtcactgtccaagctcggctgttcactggctgtgtgttcttggcatgttattcaacctctctgtgctttagtttcctcagctgtaaaatgggggtaataatagcatccatcttacagggttatagtgaagattaaatgagttaagatctgaaaaatgcttagaatagtatggggcatggaggaggcatccaattattgtagctgttgttattattattattatttccacccctccaggctgcctccacaggacagtgttgtgtacttctaggtcgtggtttgtagcacagatctaaacttaagagtatgtgcttatataaatacccagcatattgacccccagcctgtctaaactcagtctcacagctcccttagcttaaaagacaagaaagggttagaaccccggagcagagaccaggcagccactgcttgcagctcatggaacattcactgcctcttcagcttgctcacctgtaaaactgggttgataatactccctctgtttgcactgaattctcaggaatgcacgagctgtttatgcaaaagggcttttggaggaactaatgaatacactgagtgaatattactttaaaaatcatcctagggagggtctgcaggcctcag

SEQ ID NO: 8022 - DNA, 3763 bp, Homo sapiens
ctggcttcaagtgagagcctcctgccttggcctccgaaagtgctggaattacaggcccactattccacagggaaggtcagcgcttccttcacctccaccgcgatggtcccggagaccacacatgaagcagctgccatcgacgaggatgtgctgcgctaccagtttgtgaagaagaagggctacgtgcggctgcacaccaacaagggcgacctcaacctggagctgcactgcgacctgacaccaaaaacctgcgaaaacttcatcaggctttgcaagaagcattattacgatgggaccatcttccacagatccatccggaactttgtgatccaagggggcgaccccacaggcacaggcacgggtggggagtcatactgggggaagcccttcaaagacgagttccggcccaacctctcgcacacgggccgcggcatcctcagcatggccaactccgggcccaacagcaacaggtctcaattcttcatcacgtttcgctcctgtgcctacctggacaagaagcataccatctttggacgggttgttgggggctttgacgtactgacagccatggagaatgtggagagtgaccccaaaactgaccgccctaaggaggagatccgcattgatgccactacagtgttcgtggacccctatgaggaggccgatgcccagattgcgcaggagcggaagacacagctcaaggtagccccggagaccaaagtgaagagcagccagccccaggcagggagccagggcccccagaccttccgccagggcgtgggcaagtacatcaacccagcagccacgaagcgagcagcagaggaagagccctcaaccagtgccactgtccccatgtccaagaagaagcccagtcggggttttggggacttcagctcctggtagcagcaggctgcctgatgaccactagaggtatgtctgcccctcgtcaccctgctgcacaccaatctgtggcccttcatcatgctaagaacaagaactgcgccatggctggctccttctcttctccagcccatccctctgcagcctgtcatccctgtctgtgaccattggtcgggcccctgggctctagagtgacttttgacgccctccatccctcccgccaggcactgtcctccgcaaggcctggtgcagccctggcagtaactggcttgtaagaggctcagacaccaagctgggcctgcagaggaggggcacagtaggacacagtgactgcccaggtgtccacacacctgtaggcctctgagccagcgtccagggtacagatgcgggtggtggggatgaaggcctgaccagggagggagaagcaggtttggagaggaccctgtgcccaccctgacagacaccctggctggccctgactgactgtattctctggccacattcaagtcccccattggtgggggcagagaagtaggaccaggccgtccttggctccagagctcgaagaccccaagacagccctctgctctcagcggcgccacagagagcctgggctcagccttctgcatcaggacatggcctcgtccactgagggcacgatttaaacatttgacatcagaagctttatttgtaaacctcacacagataaggaccaagggctggcggtgtggccagaggacaggggaagctgaaggccccgtgcttgagctcggcagtcctgctccttgcagtgaagccaccatgggtgaccgtccagcctcacccggtggcctgcacagtgagggaagggcttcagggccatctgctcccagggcaggggacaggccaccaaggacctttggcaaatgaaggtttacatttctgtagtttgtttgttttagagcttaatttgtagttttttagctattaaaaccatttgaatttttaacgacctgatgagggcatcaggtaaattaaaggattttgggaagattcttattttcaattctaatatctgacagatgccatcaagaataagcattaaggtataaaaaatactgtgtgtataaaacaatgccaaaccacattcctacagcaaatgcactgtgccatttataaccctgacatcacctcccaaggctctcaaggaagatttattttaaataacttaaatagaagtcctagatgatattgtttaggaatttaagagggtggtggatatggtcctgtgaatagcacttcccctgaagccagctcatggtctgttcatttggtttaaaaatgagcttgtattttgcagaagcccaacaaaaaaaaagtgataaaagtgttgttggtataaattacaaaaaaaaaaaaaaaaaaatacaaaagtcataagactactagtaaaaaatgttcaatcaatgccgtcacaaaagacagtacaaaaaccaaagtgcccaaatagaaggagcagcgaacttgcccaaaacagaaaagctctaaatagaactttagtatatacaaaaaccactcggtagagttttagaagtttcttccatgtaagtgaagcatcttgagtcactcaggacttggctgtcctcgcacccgtggcaggctggggacggcacggacctccaactgtttcccctagtccccggggcatcggaggctgggttcccacatgggagaggaatgaagactcactcaaagggaagggtcagtttaagataagttttcagtgaactccttcttccacccgggaaggtgtctttcagcctcttcacagtctcaagacaattgactgaagccacaggcattgctaacttcatgggccagcttgtgggcggagcctcttcaggcttgagaccatggcagcaagagccctgcagcgtgcagtgacccctgcgctctgggtggctgcacgcgagctcaggaggacaggatgtgctgggccagcctaaaccctcgggggagactagcgcagggataaagcagcttgcagggccatagccggatgtggaggcttccaagacagtacaaagatttccttcctttcctaagtggaagatgtgctttaaaggaacttctgcctctgtcactcctgctgagtggatgcatctcagtgccatgcccaccagggcagcggcatttcccacctgccaaggcttccaggcttgggcaaagagatggcacccaaaggcatgctgtgtgtgggcagtgagctcgagtgggcacagcccagtgcctgcctggaccgcaggtctgggtttaggaagggctgaagtcgggggaggtgtgaagctgggcaggtggccacgttcttattgtcagccagctcgcactcttgcccctagactagccttgtctgaaggcagcttcagagccacttgccaggctgagaactatccgggctcagtgctctcctatctgctgcccctcggtccccctgcctgccctctgccctgagacaagttactaaatgttgaaaaccaaacttatctgggagtggtttttgacctccatcctctgcaaagtggcctaaacccttatggggtgcccactcctggtggagggcaggtggatgagtggatcgtaatttataataaaatatatggcagaaacacaggccttaggagattgcacaggcccctctatcagttcaagtgacatgggacagcaccacgcagggacgggcgacgcttctagcaggccaggcgtcttcatgcacaaaggctaaacttgttgctttaaccttttctgaacaaattttaaacattctggcaaatgtcaagttttgaagtttttcctgtgggttctggcctctttcatatgcaaaaat

SEQ ID NO: 8023 - DNA, 2690 bp, Homo sapiens
ggcggcgtcgggttgggctggaggtcgccatggggcgaggcagcggcaccttcgagcgtctcctagacaaggcgaccagccagctcctgttggagacagattgggagtccattttgcagatctgcgacctgatccgccaaggggacacacaagcaaaatatgctgtgaattccatcaagaagaaagtcaacgacaagaacccacacgtcgccttgtatgccctggaggtcatggaatctgtggtaaagaactgtggccagacagttcatgatgaggtggccaacaagcagaccatggaggagctgaaggacctgctgaagagacaagtggaggtaaacgtccgtaacaagatcctgtacctgatccaggcctgggcgcatgccttccggaacgagcccaagtacaaggtggtccaggacacctaccagatcatgaaggtggaggggcacgtctttccagaattcaaagagagcgatgccatgtttgctgccgagagagccccagactgggtggacgctgaggaatgccaccgctgcagggtgcagttcggggtgatgacccgtaagcaccactgccgggcgtgtgggcagatattctgtggaaagtgttcttccaagtactccaccatccccaagtttggcatcgagaaggaggtgcgcgtgtgtgagccctgctacgagcagctgaacaggaaagcggagggaaaggccacttccaccactgagctgccccccgattacctgaccagccccctgtctcagcagtcccagctgccccccaagagggacgagacggccctgcaggaggaggaggagctgcagctggccctggcgctgtcacagtcagaggcggaggagaaggagaggctgagacagaagtccacgtacacttcttaccccaaggcggagcccatgccctcggcctcctcagcgccccccgccagcagcctgtactcttcacctgtgaactcgtcggcgcctctggctgaggacatcgaccctgagctcgcacggtatctcaaccggaactactgggagaagaagcaggaggaggctcgcaagagccccacgccatctgcgcccgtgcccctgacggagccggctgcacagcctggggaagggcacgcagcccccaccaacgtggtggagaaccccctcccggagacagactctcagcccattcctccctctggtggcccctttagtgagccacagttccacaatggcgagtctgaggagagccacgagcagttcctgaaggcgctgcagaacgccgtcaccaccttcgtgaaccgcatgaagagtaaccacatgcggggccgcagcatcaccaatgactcggccgtgctctcactcttccagtccatcaacggcatgcacccgcagctgctggagctgctcaaccagctggacgagcgcaggctgtactatgaggggctgcaggacaagctggcacagatccgcgatgcccggggggcgctgagtgccctgcgcgaagagcaccgggagaagcttcgccgggcagccgaggaggcagagcgccagcgccagatccagctggcccagaagctggagataatgcatggcgtgtacatgagccagccggcccctgccgctggcccctaccccagcatgcccagcactgcggctgatcccagcatggtgagtgcctacatgtacccagcaggggccactggggcgcaggcggccccccaggcccaggccggacccaccgccagccccgcttactcatcctaccagcctactcccacagcgggctaccagaacgtggcctcccaggccccacagagcctcccggccatctctcagcctccgcagtccagcaccatgggctacatggggagccagtcagtctccatgggctaccagccttacaacatgcagaatctcatgaccaccctcccaagccaggatgcgtctctgccaccccagcagccctacatcgcggggcagcagcccatgtaccagcagatggcaccctctggcggtcccccccagcagcagccccccgtggcccagcaaccgcaggcacaggggccgccggcacagggcagcgaggcccagctcatttcattcgactgacccaggccatgctcacgtccggagtaacactacatacagttcacctgaaacgcctcgtctctaactgccgtcgtcctgcctccctgtcctctactgccggtagtgtccctttctctgcgagtgagggggggccttcaccccaagcccacctcccttgtcctcagcctactgcagtccctgagttagtctctgctttctttccccagggctgggccatggggagggaaggactttctcccaggggaagcccccagccctgtgggtcatggtctgtgagaggtggcaggaatggggaccctcaccccccaagcagcctgtgccctctggccgcactgtgagctggctgtggtgtctgggtgtggcctggggctccctctgcaggggcctctctcggcagccacagccaagggtggaggcttcaggtctccagcttctctgcttctcagctgccatctccagtgccccagaatggtacagcgataataaaatgtatttcagaaaaaaaaaaaaaaaaaaaaaaaaaaaaaaaaaaaaaaaaaaaaaaaaaaaaaaaaaaaaaaaaaaaaaaaaaaaaaaaaaaaaaaaaaa

SEQ ID NO: 8024 - DNA, 5526 bp, Homo sapiens
gaggggccgctggaggctggaggtccccattcagttgcactacaaacactgaccaaatatgcaaggaaggagctgtgtttgtttgttgtcgtcccagacagtgttgtgagggacctgaggccctgccccgtgtccgaccaccgagtggcaaggtggaaggaagcacaggcacacagaccgtgggtgggtctcctcaccgtggctgtgggcagtgcgaacacgtaacaccctcgggctaaaagtgactcgttgaccaagttggaaccggaatgctttcttactcaaaatggcttttgtaactattgatttctgaagctggttttatgagttgtgacaatgttaccaggttgggggtatgtgtttatttcctacaaagtacttacgggactaatgggcaaaacagagatttttaagtcttccgtatgctgtttgacttttatatttttaagttatattttcatactattgtatttaaaaactctttttagtccccaaagaaatgggtttatttgcctttcatggggtgtgggctggcaggaggaaaaatcgggagttttttatttggaatattattagatgatgccctatgataagatgagacaaatgatggggagggaaggaggatggcccttctctagaatcagcaaacccaatggttctgtgaaggtcagacccaagcttggagcagctggtctggatgcagatccaggagctgcagagtgtggaacaggaaaggctctgcccagggcccacgagctctagcattcctgctggcagattagagatcttagttaaatttgaccaagaaaggagcttagctaagaggtctttgtttccagaggacccaagactaccagactcctgtgcagtctgcctgtctgcagagcctccaatcacggtttaaagtggtcttggcctcccagcccccactgctgcagccttcagagccagcctctggactcagcgccaggagcctcctctcctgctgccctggtacctgtcatcctagtgtcacctatttgttttgcacagcattctggagaacatgtgcctcacaaagtgatcctgtttttctcaccctccaaagctgaggtggctaagggaggcaggggtgagagagctcactctctaaaccacaggcagggcaaggtgcttctaggccgtgtcccctccctggggaatggtcactactcctcagcatggccacaggcccctgtggttttgggagtttgctgagtgactggaatgggctgaccccagccgtttccctgctgtggaagcagcaaggtaggggcactgctcggtggtttgtcaagctcagaggcagccacggatggttaggaacaggaagccacactgctaaggtgtgatgagctagaagggagacatcctggacttcaagtgagacaagtgcagaggaggccactccacttaggaccttcctcttagacctgcatgagcacgtgtttcacttaagcacattgggtccgaattgtggcgcatgaacccagctgttaaaccaggtaccctgggactgccctctgcctctcagagccctacctgtcctggacttgaaggcgagcatcaggcaggccttctcagcccatcttccaccaggagtgcagagccagggtgctgagaggagcagggactgtaactacagtaggaggcaactttgctggtgtcattcctgctcggattgactttgtgctccctcccatccacagctatggtagccagtatttccccagcagctctctagtggggaagagtggctagaaccaggccattctcagtcgaatttaggaagaccaagactcatgttcctgacaggacggtcattccctcatggcatcactgactcagttctaattcctcccctcctgtttcattttggtttgaacaacctgtgcctgcagctgtttcttccaccttcctggagctcacaattggagcttcatgttcagtcttgagctcctaatgtttccagacagggcaggggataggacagccataatctatgaaagctgtgaaacaaaccctgggttatatagacctcagatggtctcatctgaaggctttgcccacttcccagtgagcagagggtttggggaacaaagaggtagctgaagagtggtggtttttccctgtatcctgattttcagaaagggctttagtctctgagctgtggctagtagctggctggctgaccaggggacgggggtctaatagggtgtctgaccataggacacctctcgtgtttggccttccctttcttgtgtgtttgtgtgtgtgtgtgcatgtacacacacaaatctgtatccccaggagtgcctcctgcagtcactgggggctcttccgtggtgcaccatcccatgagagcagatcagagggctgtggtcaggacttcctcccgagctgccctccctccctgggatgagtttcctctccacctgctccaaggtgccttacgaggtgcagctcttcacctggccacatggcatccatcaccgtgttgagaaatggtgggacgttggctggatattgtgtgctatgaatctgatttgtccaaatctggacctcagccaagccacctgtggtggaaccttgcaagtcaaggtcatgaacaaatttcttgtaactattggaaataaactaatgaggtagaactgtcatatccaaatggaagaggtggttggtactgttacttccttttgctgtcagagggttgttgacaatggcaaggggggatgttagtgagatccaggtggtggtggcttcttggtccactcagcttgcacacatgcaagaggagggtctgtggcccctcagccgtgctggtggcctccttcctcaagctttaacttgtgccctccctggcaacagggagtcatgggttaatgtcacctgtcatgcctctttcttcagggaaaatattaaaaggctcaaatccaagctgtgacttcccttagacagtgtaagcctgtagggtgcagccccaagtttatgtccaaaggctgcctcagaaccctggagggagcagcgcccagctggcagctcactctccccttgcagttcactggccttttcgcagccaggctaagataggcagtgcaaggagcttcccactggccagagcagctgccttgtagaatgtggggctggcttttagaagtttcacacgcttgcagctaagagtgcagagctctctgttttacttcgtgaaacattagcagctctgaggggcttggcttttggtaagggacttatagtctgacttgccacaagcaccttgagctcctgggttggttggtggttggttggttgggttgttttaaatttgatttttcttttcctgaagtttgttagaagtcagacctatgcaaggaaaaccatggcccacttcagcagccatccagtgggggtgcttaatcggtggtggtaggattcatggaaacgtttttttgaaatgaaagagaagatgatgtacttacattgtaaaatggtttacaataaagtttggcatcttattacagttttttttaaaaagaaaccatcacatttgtggttgttggttgtgggttctctggagttgaaacagcttggcagggtcaaaaaagattcccctgtgaattagaaggttctccccagggaccagagtgagaaggaaccttacgaagcctcatggcaggagtgggagccagcaactgcccagtgaaaagccaaacatgctcttgccatgtccatctccacttcttcgctagtgagaattaaagcaagtccgtctctgaggaggacatcgtgttggggaggtagagtataagcagtgagtagcccacatccttgtccctgaggctgcggggctggaaggaggtccctgggcagagccgcagcatcaggtgccatctgcaggggcacccctggaactagtggaaggcccccacaaggcctggcctgccctcagctgcctcttggcccatgtgccacatcctgggcattcctcatgtcagcacttgtctcagatcaagcctggcagtcctctcattggcctcctggagccagggtgtcaggagggggattggggtggggttcaaagtatgacagcaatggagtggcatttgggataaccaaatgtcagtgcctggttgagttccatctgcctggagccttcgaggataaaaataatctccatcataaactgaaaaggacttagatatgtgtgttactgggagggctgcgacctatgcacacctattccccatacccaccccaggcgtaggctcctggcctgtgccctgggggatcttccccttgcaaggaggggtgtgttaggagcttctagcaaaggagagctaagtgaccttccggggagcccttgggcctgttcttgtctctgcagctcagtatctggagtgggcttcactctcccccaccctctttgagcaactgaaactgtcctgcaggccagcccccctgcggtggcctcacctactcggaggacccaaatccgtaaacacaaagcatgtccgtcagtgccagcacctccccccggcgaatcaagcagctgtcccagagggcaaagggtctctgcagccatctgctttcatcagggctgcagcccccaggcagcagtactgggagcccctctcatctccgagaataaactctgaagccagcgaccctgcggacctgaatcatcagggagcctgtcagaggaggggcagtgactctgcgggacaagcaagcaggctatataagtttcagaaggctgggctccactcagatcttttccagcagctgctgcctgccagagaggcgccttcagagacccagcgcttacacaatacccaccatgtcccaggctggtgctcaggaagcccctatcaagaagaagcgcccccctgtgaaggaggaggacctgaagggggcccgaggaaacctgaccaagaaccaggaaatcaagtccaagacctaccaggtcatgcgagagtgtgagcaagctggctcggccgccccgtcggtgttcagccgcacccgcacaggtaccgagactgtctttgagaagcccaaagccggacccaccaagagtgtcttcggctgagaagtgtgcgccactccccttgctgcccgaatgctcggaaacaggagccttacccaggaactcttttttatgccagaacgcttcctctcccctgctgtctctggggctgccaccctcccccacagtccaggcccttcagccaagggctctgcaccagcaccttggaagcaccaataaagaggatgcccacgtggccccagcaaaaaaaaaaaaaaaaaaaaaaaataaaaacaatgttgggggcggcggcgccccaaaaggttttttaacccccttctgtggggccgcgccccaaatggtttagaccacgggccggggttcccacaaaaaaccggccggcctcggtggttccaccaaaaaaaggccggggggcgcgggtgtgtaaaccgggggtcggggctatgttccggggccgggtggatatg

SEQ ID NO: 8025 - DNA, 4032 bp, Homo sapiens
  misc_feature (458)..(472): n is a, c, g, or t
tattatacaaaactaggtgtggatgtagttgtgcacattatagcagaaattatgagaatgatcatttcagattgaacaggaatttactattacaggggttagtatcattcaaggatgtggctgtggatttcacccaggaggagtggcagcaacttgacccttctcagaggaccctgtacagggatgtgatgctggagaactacagccacctggtctcaatggggtatccagtttccaaaccagatgtcatctccaagttggaacaaggagaagagccatggatcataaagggagacatatcaattggttctatccagatggaatatcaggcagatgggagacaagggaagtgaaatatcaatttatgtttttttaattgattggtgcctgaggtttatgtttctatccttatcaaaatctcctattctttgcttctatgctgagaatttagtagtcannnnnnnnnnnnnnntgaagcctttcagaggagttctatttgttgttgatcctgtctcttgtgtgtatatatatatgtttatatttgttgtctttcctgaaagggttttaaaggcaatagaaggcaaattcctttcaagaacacaagctgtgctttaaaaggcaatattcccagataaatgactgtattaaattaaatgtcaaatacagttactgttttagaagttcagagaaaattaagagtctaaagagatgtgagcgtatttgagaaacatttttcagagcatgcaactgtaactgctctgaatgacataaatgctgatgaggctgaaggaggagggtgaaggcaagcagtgttggagagagagtatatgaacaaaaccttagggtcaggaagatacagcttttctgggagaactttactagttttactcgacatgtatagaaagtagtttattgggagtagtggaatttacgtctgtattctcagtttgactctgatactgaatctgtagcaggatattggatttttctattatttgttagttgttaggaaaatagatggaggagagttaaagtattttgcatacagaagataccttgttttttagagtgatggtaggataataagaatgtgtagcacatgatttataatataaatgaaattaaaaggtgaaaaggggtttctattcagaaagcagaagtgaaatattctagaagaataatcaaaaattagtgatgagaccccactttttcatctcttttaagtttagtttttacatgaatatttctgtttaacattcttgtctgtctattcacctgataacactatatgctgtactgtcttctgagatgacctgtttccatcctttttttgtgagttcatctactatgttggatcatccatttgttctacttctttaccctcttaattgactcttgtgatgactcttaaattgtatcttttcttcttttagacaggaagagtaaccttcacaactcccagtcatgtattttggggacagtttccttccatcataagatactgaaaggagtcacaagggatggttcattgtgctccattttaaaagtctgtcaaggtgatggtcagctgcagagatttctagagaatcaagacaaactcttcaggcaggtcacatttgttaacagcaaaacagtgactgaggcatcagggcttaaatataatccactggggaaaatatttcaagagtgcatagaaacggatatatcaatacagagattccataaatatgatgcttttaaaaagaacttaaaaccaaatattgacctaccgagttgttataagagcaattcaagaaaaaaacctgatcagagttttggaggtggaaaatcatctagccagagtgagcccaattctaatcttgagaagattcacaatggagtaataccttttgatgataatcagtgtggaaacgtttttagaaatacacaatcccttattcaatatcagaatgtggaaactaaagagaaaagctgtgtatgtgttacatgtggaaaagcctttgctaagaagtcacaactcattgtacatcaaagaattcatactggaaagaaaccatatgattgtggtgcatgcggaaaagccttcagtgagaagtttcatcttgttgtacatcagagaactcatactggggagaaaccttatgattgttctgaatgtggaaaagccttctctcagaaatcgtcccttattatacatcagagagttcacactggggaaaaaccctatgaatgtagtgaatgcgggaaggccttctcccagaaatcacccctcattatacatcagagaatacatactggggaaaaaccctatgaatgtagagagtgtgggaaggccttttcccagaagtcacagctgattatacaccacagagctcatactggagagaagccgtatgagtgtaccgaatgtgggaaagccttctgtgagaagtcccacctcattatacataaaagaattcacactggtgagaaaccctacaaatgtgctcaatgtgaggaagccttcagcaggaagacagaactcattacacatcagttagttcatactggggaaaaaccttatgaatgtactgaatgtggaaagacattctcccgcaagtcacagctcatcatacatcagagaacacatactggagaaaaaccctataaatgtagtgaatgtggcaaagccttctgccagaagtcacatctcattggacatcagagaattcacacaggagaaaaaccttatatatgtactgaatgtgggaaagccttctctcagaagtcccaccttccgggacaccagcgaattcatacaggagagaaaccttacatatgtgctgaatgtggaaaggccttttctcagaagtcagaccttgttttacatcagaggattcatactggggaaagaccctatcaatgtgctatatgtgggaaggccttcatccagaagtcacaactaactgtacaccagagaattcacacagtggtaaaatcataatgaactggccacagaaaagccttagtattagctcaagccttaataattactagaaacccaattaatttgataagcttggggacaacatcccaatagataaaaatttttaagggaatttgtttctagtttggtgatgcctaacttttccagcaaagatgatggaaaatagttatataaatgaagaacatttttaatatggcatgtaaagcttttaaagttatgaactcagtgatcagcacagcaagttaagcatacagaatattgtcaagttgcatattccttatactacaaaatgataatcagccattgtgaaactgctaatattagcttgtcataattatggccataaactaatttttctataaaagacgtggaagaaagcttaagtaaacaataaaataaaacctatacactattttaagaaggggcttgagcatgacccctaaagctacatgtaaagttcttgtacaaaaaatggaatgataggttgatcagattcagtaaagttgatctgtatgcattttcccatctcaagcatataagttgacctgcatctctggaaggaccttgagattgatgcattttgagcaggtctcccttttactcttcccaactgggaacttggagctgaaaaacattggcactgaggccagatggccttgggtttaatcctggctcagtgcctcacagattgtgtgactttaggcaaacatacttctcctagctgagtattttttatcagtaagtacaaatacaatgcagagctcattttcagttaatattagtactttttaaatctttactctctatcttgaagcattagatgttaagactaatgtgtaaaaaccacgtctgagcttgcttttccctctggacactctgcttttgattgcctatccctataagtggctcattttactgtcttctgatcctggtggccttatttttgctatgttaaggttgtgttttttaatacttggatttattttcatatacttacataaaccgtggtgattgcacataaaaaaaaaaaaaaaaaaaaaaaaaaa

SEQ ID NO: 8026 - DNA, 1672 bp, Homo sapiens
  misc_feature (510)..(524): n is a, c, g, or t
cccagaccagacatggctctggctaattgctcagtaagcaggcgatttcgggggctgccgagggccaggtgctgcggcaggcactggagaaacggccgagacactgagtgtggggccccggaattcagaccatgtcaaaggctttgggatagaaacagtggtgtgctgggtcagcagcagagtgccggctcttcaggaagtcagttccggctccaaaggccgccggaaggagtcctggttcttttctttctgattctttatgtatactgtttacatattttaagtcaattgcatctgcaaaggaatgccctgtgtgtgattcctcaagatttctttcagttgcttccgaacctgacttggctggacctccggtacaatagaattaaagcgcttccttctgggattggagctcaccagcatttgaaaactttgcttttagaaagaaatcctatcaaaatgttacctgtggagctggggagcgtaaccacgctgaaagcactgaacctaagnnnnnnnnnnnnnnnattccctcctcagctcgttgtgcagaagggattggtggctatccagcgcttcctgcggatgtgggcagtagaacactctctccccagaaatccaacttctcaagaggctccaccggttagagagatgaccctccgtgacctcccgagcccaggactggagttgtctggagaccacgcgtctaaccaaggagctgtgaacgctcaggacccagagggggctgtgatgaaagagaaggccagctttctcccgcctgtggaaaagccagacctgagtgaactcaggaagtctgcggactcctcagagaactggcccagcgaggaggagatcaggcgcttttggaagctgaggcaggagattgttgagcacgtgaaggcagacgttctgggagatcagctcttgacgagggaattacctccaaatctcaaggcggccttgaacattgagaaagaactaccaaagccaagacacgttttcagaaggaagacagcctcctccaggagcatcttacccgacctcttgtcaccgtaccaaatggcgatccgagcaaaaagactggaagagagccgagcggcggcgctccgagagctccaggagaagcaggctctgatggagcagcagagacgagagaaaagggcactgcaggagtggagagagcgagcccagaggatgaggaagaggaaggaaaagagttcagcagaatttccgtgcctccgcccggaggagcatggtggcatcaaagattccctctgccacagatctgatagataacaggaaagtaccactgaatccgcctggaaaaatgaaaccaagcaaagagaaatcgccacaagcaagtaaagaaatgagtgccctgcaggagagaaatttagaagagaagataaaacagcacgtcctccaaatgcgtgagcaaagaagattccatggccaggccccactggaggagatgaggaaggctgccgaggatctggaaattagccggagatgggagagaggaggcatgagggcaggatgtggagccacttcatggagaccccacccaacctgactcggaccccacttctgagactcttttcctcctcagcccaagggagtttgtatctgcctttagataaactctttatctttctaaaaaaaaaaaaaaaaaaaa

SEQ ID NO: 8027 - DNA, 3325 bp, Homo sapiens
  misc_feature (1146)..(1178): n is a, c, g, or t
gcccccgctccgccgcggagtttctgcatgactgtcacaaagatgtcctggcgtccgcaataccgtagctccaagttccggaatgtctacgggaaggtggccaaccgggagcactgcttcgatgggatccccatcaccaagaatgtgcacgacaaccacttctgtgccgtcaacacccgcttcctggccatcgtcaccgagagcgcagggggcggctccttcctcgtcatccccctggagcagacaggcaggattgaacccaactaccccaaggtctgcggccaccagggcaatgtgctggatatcaaatggaaccccttcatcgacaacatcattgcctcgtgctcggaggacacgtcggtgcggatctgggagatccccgagggcgggctgaagcggaacatgacggaggcgctcctggagctgcacgggcacagccggcgtgtggggctggtcgagtggcaccccaccaccaacaacatcctgttcagcgctggctacgactacaaggtcctcatctggaacctggatgtgggtgagccggtgaagatgattgactgccacacggatgtgatcctctgcatgtccttcaacacggacggcagcctgctcaccaccacgtgcaaggacaagaagctgcgtgtgattgagccccgctctggccgtgttctgcaggaggccaactgcaaaaaccacagagtgaaccgggtggtgttcctggggaacatgaagcggtcctcacgacagggtctccaggtggaacacaagacagattgccctctgggaccaggaggacctctccatgcccctgatcgaagaggaaattgatgggctctctggcctcctgttccccttctatgatgctgacacccacatgctctacctggctggaaagggtgatggaaacatccggtactacgagatcagcactgagaagccctacctgagttacctcatggagttccgctccccagccccgcagaaaggcctaggggtcatgcccaagcacgggctggatgtgtcagcctgcgaggtgttccgcttctacaagctggtgactctcaagggcctgatcgagcccatctccatgatcgtgccccggaggtcagattcctaccaggaagacatttacccaatgacacaggnnnnnnnnnnnnnnnnnnnnnnnnnnnnnnnnnggggaggcatcaaccgagatcccgtgctgatgtctttgaaagaaggctataagaagtcctcaaaaatggtatttaaggctcccatcaaagaaaagaagagtgttgtggtcaacggaatagatttattagaaaatgtcccacccaggacagagaatgagctccttcgaatgttcttccggcagcaggatgagattcgacggttgaaagaggagctggcccagaaggacatccgcattcggcagctccagctggaactgaaaaacttgcgcaacagccccaagaactgttagctccccagctgggctgttttctaagccgatctctccgtcgtttctactcatcccttaacttctcccttaccagtgaccccagagacagagccaggacaggagtgggggccagcctgaggacccccgcctaccacctcgagaactggaagccaacctctaacctcctgacctcatgctaataaaagtccccagcttctggagaccccctgccggcagcccctttccctgccaccccaggagccaggcttcccctcagctgggtgaagactacagactccctggggttggcaggggctccatctcagtggaccaggaagcaagaggggaagcgggatcccagctagacttagaacttggacttttcccctgtgaagggggctgccaggacatctcagcactcccgcctggagctctcagcatcactgaaggtaccacagtgtaagtgctggactgcaggctgcagtgatccctttttcgtcccaccccctcttccctcagcagccccggaagcctgcctcacccgacgaggacagcgagcggcccggctcctttctgtctcttcccttcccaccctcttgtcttcagggaattcagaggattgctctccaaggccataatgaccccttgccttccccatgattctctacaaagctcttgcacacccttttcccattcaatttgtgagccaggcagggtagggattagtgtccccctttgacaaatgacagaactgagggttgcaatggggaaatgacttataaagtcacccagcaggtcaacaatgggcccacgaccaagaccctgggtgttcagaccccaaggccagggcctttcccgctgcatcaagatgccaatccctttgtgggcttcaccagtgcccaagtctctatggagaatgagaactggaagccactgctaccgtctacccagcaccagtagtgccgatgtgccacactgcccagttgaggcccctcacgctctgtgcccctagatccttcaggtccccaccctcagctgtcaccaccaccctccccaggggactccatctgagatgaggcctcgtcctcctggaagctgaggctgagaagggtggagcttggccctggggaaggcagaccagggtctgatggcttctagggatgctctgcgtgtgtctcagcaccgctatctcagccactttcagccttatgcacgtagaatgaccacagccactcgcatccgtatagcactttaaagtttctgcagtcctttgacacataggatctcatcgagcctcacgtctactcccttctgcagatgaggaaaccgagagaagtggcccaaggtcacgcaactctgagatgccacatttcatttgatcttgtacacattttcttttattccttcttttttcctcctttcatttcccactacgcacaaagagtttataaacactgttctcagaagagtcacagtttggggtgagatctggaaatcaagaaatgggtgtccactcttttctttcattagctaggatctactagatgcattatactccatacctgcttttcccatggccgccctacggaaaatcccatccacagaggccagggctacccaagcccctccaggtgagctgggcctttcctttatgaacctccatcctcccagccagctacagtagggcctcctcaccccgtaccccacagctagacagtgtcagcactcatctcctcctcccacatttctggagcttttttttttccttccccattgacctttgtggtcttctgtgattatttatgctgcctcccaaggatagaattgaaataaaatgttttcaacttaaaaaaaaaaaaaaaaaaaaaaaaggaaaaa

SEQ ID NO: 8028 - DNA, 3346 bp, Homo sapiens
ctcactccaccctgtgaggtagtgtctttatcccctaagcccagaggtttagcaacttgcctaatgtaccagaagctggaagcagagtcaggatttgaactgagtttttcttttgttgtttgttcttagctgtaattcctatgcttctatttcagagagccaggagagtttgatattaaaggaggttaaaactgtgatcttatgccatgtcatcaatggccacttaggggccatggctgatgacacattcttatctctacagtactaatgtgttattatagagccatgcattttatttctgaataagaacatatttaaactaatattcccttacaatatggacagtattaatccttccaagatgcagtatttatcaagtgaagcatatttagcagcaaattccattttaacataacttaggaaccaataaccagggtgttttgtggttgggggaggcacggggtggagtattcttttttatatcctcaaaacaaaaaaaatcaatacttatatttcaatggcaatctagtatttttttaaaagactgtataggcatgaataatagaggtggtttgagttttgtagggccatcacctggaaagtcaatgtgactagacacaaagtagcccagaggctacttttcttcctacagcttattatagttgtaggttctatgacctcacttcatgggttccaggcaattccgctgaaaggtttgtctcctgaaattttttaagtttgttttcctgacacatgtaatcagatgtgtagcaaccgagggaaacgaagcctaacattctccattgtggaaatacacacaggaggttacacttcacagcgtggatttttccagcttacacatgtgggatgacatcacagaaaccacaaaagcagcaaattaaactgtaggagagtcaatactcctgacgagtctcggggggggcatttttatgccttcttaactttatgagaattctcaggctgaactataggccattgttcccaggcaaatcaatacagcaatgcatcctcaaaaaaaaaaaaaaaaaaaaacggctaaaactgtgtcaaaatgttcttaaggagcctatggtctccacggtgctaaaaagagcctggtgctgggccgactggcagggctgagcatcctcctgccccctcgccactgatgtttactaagcactctgagccaatgagacccccagcagcagaaagggcacaaggtggcgccagggcagcagggccagatctttctcatgcacctcgacctcttgcagactttcttcgtgagatgtactactcatttcaaaactgctttgcagggctcccctatgtattcggggggcccacggcacactcaggctggagatccttcctcactgcgctcaagatggcctcagccagacaccagttacccagctgaaagtcacaatccctcccagaagtctcccaacactagtgctgaccagaggtggggctctcaggctaggagtttcacacacaatgacaggctgctgggggacattgcaggaccccttttcctctcctctccatgctagaagccagccctaggcagctgcagttactccctgtgactcagcagcaggctgattcaacacagctgcccacacaaagccagtggctaatacatctgtttacctttccctatcacccagacacaagcccctttcccaggtcaaaccacaggccgatgcatctccagtttgacagtcaaatcactacttccattgctactttagatcagccaaagtggtgactgctgcagtgtgtggctatccctacaaggcccacccaagggatgcccaaagcccaaccttctccagggctgcagcccagagcaaccccaccagcctaagtccagcagaggacctcccacccaatgtcttgttctaattagaaggggaagttagccacagaaaatcaacttatctataattacaaaattctcttgactcaccttaaagttcctattgacatctactgcttttaaacctatttgaaaactctgatactaaaacaaatgacactctaagaaagtttgggagccccatgctgagaaccatttctgtgcagtgaggatgtttccagaagctacttacctacatgtgaatgtgccattttctttccttttgtagagaaaatcccctttactttttggaacagtaatggcagcttctagtacagccattacagtttcatatgagaaaaattaagaataactataaaattgttaaaatatccaataatggataatgatggccagaagatttaacatacaaagtaattctcaatgtaaagctattcagctcttccaggttgaatgccctgtaacccaccctgaccttccacatcatcttcaaaaagcagtttctctgttccccatgattctcctataaggtaactctttagtcctccatttagcacattttaaatcctccaaagaataagtatcatgtgattattttagctttacaaaaaaaaagttgaatggcgttttattttcatggcctataagcaggtaccttagtagggcagatataggaaaaacaaattagagcaaaacaaatcctctacaaatccaaggcaggaaaagtggtggcagagtgactcattctcctgtccctcccatcaggtcaaatcaggaggctgcagtgaatgcctgttctttgaatgtgtagcagttgttcctgtaactctttaaaacttggctataggctgtttagcacagtacagattaaagatacagttacgtaaacagcaaagtaattttatagtgcttcatccatttatcatgctttggtttgctaattttttcacatacctttttctatcacagtctgttgcttttgtacacatttctcatattggggttcgacaggtaaacacaaactgctatttcagtagaaaaagttattgttatgaatattaaacccaataaattgtataaaggtaaatatcaaaaaaaaaaaaaaaaaaaaaaaaaaaaagacaagaaaaaacaaacaaacaacacagtgatgtgggcgagccggcagcgccccagcagaagaaggctgtcgagaaaaccacacgatgcgagcgggagcgccgccggacgaccacgaaggagggagaagcagacagcggggcgcacaaaagggtgtacccagaagagaaaactcggggcaacaaaaaacagacgggggcgggtgtaccccgccaaaaaaaaaaaagcgccggggggaaaacccgcaggcgtggtggaacaaccacagagggggagttcagggaggccacacggagggcatcatacaaaggaggcgccagggacgtgtatatagagacc

SEQ ID NO: 8029 - DNA, 5299 bp, Homo sapiens
  misc_feature (2448)..(2452): n is a, c, g, or t
  misc_feature (2890)..(2911): n is a, c, g, or t
cacgatttggggcagccggggtttggtaccgagcggagaggagatgcacacggcactcgagtgtgaggaaaaatagaaatgaaggtacatatgcacacaaaattttgcctcatttgtttgctgacatttatttttcatcattgcaaccattgccatgaagaacatgaccatggccctgaagcgcttcacagacagcatcgtggaatgacagaattggagccaagcaaattttcaaagcaagctgctgaaaatgaaaaaaaatactatattgaaaaactttttgagcgttatggtgaaaatggaagattatccttttttggtttggagaaacttttaacaaacttgggccttggagagagaaaagtagttgagattaatcatgaggatcttggccacgatcatgtttctcatttagatattttggcagttcaagagggaaagcattttcactcacataaccaccagcattcccataatcatttaaattcagaaaatcaaactgtgaccagtgtatccacaaaaagaaaccataaatgtgatccagagaaagagacagttgaagtgtctgtaaaatctgatgataaacatatgcatgaccataatcaccgcctacgtcatcaccatcgtttgcatcatcatcttgatcataacaacactcaccattttcataatgattccattactcccagtgagcgtggggagcctagcaatgaaccttcaacagagaccaataaaacccagggaaccaatctggataaactaccgaaaggaaagaggaagaaaaaagggaggaaaagtaatgaaaattctgaggttattacaccaggttttccccctaaccatgatcagggtgaacagtatgagcataatcgggtccacaaacctgatcgtgtacataacccaggtcattctcatgtacatcttccagaacgtaatggtcatgatcctggtcgtggacaccaagatcttgatcctgataatgaaggtgaacttcgacatactagaaagagagaagcaccacatgttaaaaataatgcaataatttctttgagaaaagatctaaatgaagatgaccatcatcatgaatgtttgaacgtcactcagttattaaaatactatggtcatggtgccaactctcccatctcaactgatttatttacatacctttgccctgcattgttatatcaaatcgacagcagactttgtattgagcattttgacaaacttttagttgaagatataaataaggataaaaacctggttcctgaagatgaggcaaatataggggcatcagcctggatttgtggtatcatttctatcactgtcattagcctgctttccttgctaggcgtgatcttggttcctatcattaaccaaggatgcttcaaattccttcttacattccttgttgcattagctgtaggtacaatgagtggagacgcccttcttcatctactgccccattctcagggtggacatgatcacagtcaccaacatgcacatgggcatggacattctcatggacatgaatctaacaagtttttggaagaatatgatgctgtattgaaaggacttgttgctctaggaggcatttacttgctatttatcattgaacactgcattagaatgtttaagcactacaaacaacaaagaggaaaacagaaatggtttatgaaacagaacacagaagaatcaactattggaagaaagctttcagatcacaagttaaacaatacaccagattctgactggcttcaactcaagcctcttgccggaactgatgactcggttgtttctgaagatcgacttaatgaaactgaactgacagatttagaaggccaacaagaatcccctcctaaaaattacctttgtatagaagaggagaaaatcatagaccattctcacagtgatggattacataccattcatgagcatgatctccatgctgctgcacataaccaccacggcgagaacaaaactgtgctgaggaagcataatcaccagtggcaccacaagcattctcatcattcccatggcccctgtcattctggatccgatctgaaagaaacaggaatagctaatatagcctggatggtgatcatgggggatggcatccacaacttcagtgatgggctcgcaattggtgcagctttcagtgctggattgacaggaggaatcagtacttctatagccgtcttctgtcatgaactgccacatgaattaggagattttgcagttcttcttaaagcaggcatgactgtaaagcaagcaattgtatacaacctcctctctgccatgatggcttacataggcatgctcataggcacagctgttggtcagtatgccaataacatcacactttggatctttgcagtcactgcaggcatgttcctctatgtagccttggtggatatgcttccagaaatgttgcatggtgatggtgacaannnnnagcgatggctttgtcctgtggggcaattcatccttcagaatttaggattgctctttggatttgccattatgctggtgattgccctctatgaagataaaattgtgtttgacatccagttttgacctttcccagtaatcactgttgattacgagaatgttaccatgcagctttgcatctgttccttgtactgtatgcacattgctcaaaggaaagtcagtggcttgcactacttacaagtttcatagatttgagcctaaccacaagaggctggtgcttagtactgttttccctgcacgtaggggtcttttaaaaatataaagcttgtgataaagagaggagaatatgggactccatgaaccagtgttgatatgtttgattaagacttttcacaaaataatcatataaaacactagtctctttattagtagaaacttctgnnnnnnnnnnnnnnnnnnnnnnagagatcgaaccaaaaaaaatcatttaaactttaaaaatattttaaatggactttggggagacattttttgtgtgttttaagaatgaattgtagtgctctttaattcagctacatatattcatgtggtgatagggatcaacttgacacaactttgaaactgcataaagtagacataggaactagaggaaagctcaggctgcattagagtatgaatttagcattgggaaaagcccttattcttgaatctagagttactatttttgtatatatttgcataagtgtttaacttgaggcctaaactactgaaatttgtgattgtatgtttgtgtgagcttcagtttaatgaaagattcataatggttctttgtattattataatacttggtgttggggtgttctttctgttttgttttttactttaattttgttttgatttttttttttttttttttggcgggggtaggtgagggtttggagcatgtggtctttttaaaaaattgtaaccctctagaaaatatcaaagaaatgaaccagacgtggtttaaatagttgattttcctattttaacagtaccaactagttaattgggaaatgtaagttctgaatgttcacattgctttaccagtttggcactggaaccaagagcacatgtcgtggctggctacaaggttgtaaagcagaaaatcgaagtttaccatgtctgtaatgtgtacatgaagtgtcaatttagaacagttactaggataaactccattattgccatggctgtcatggtacccaagtgacttggaagatgcatttaaattactcagctgaaatcacttgatcatcttgtgccaagatatgctgttggtgcctgatagggattagtcttttaggtgccctgttctcctaccataattgtgaatgatttgtgagaagtgcaagccatgtttatcctgaatttttacttaataatttgtattactagtcatatgcatgtagctttctgtttacatcctatgccacatggtcttcatttatgccaggtaaactgtatttgaactatgtgcagctagctttgttttaatctgcttggcaaccagtgtagctgctgtaacaatctatcttattgttcaaatatataagagccaaactcttttccattccatctaaaatgttttcatttagtactcttctttcctcctactctatgaacttcaaaacaaaaacaaaactttgagagcagcacatgcatccaggtatttatagattattgccagtgtcttttctgtatgctataagcaagggagcttaggtgttatttctttaatttatgcttgaatctgaaaaattatttctgacttactccatggcctccttataataagtagaagttttatatataattaattttcagcattgggcactgaattaggacagtcctcatctcattgcttggcccttcaagcaacctagctaaaaggtgctgatattttatttagtactgccaacttcaagtgatttagatatctatctatctagatttctgaaccaagatatatttatagttcacttttgggtttttatacccacggtaggattctgcattccagcattaaatctgcttcattttagaacctttataaaagcaatagctggaatatactcccagttttaaaataaatgcctgattgatttaaagcaagtaggttatgctgaagtatataaagaagttttatattctctcaaaaatggtattatctttctttatttgctagattcttacaaatcttttaagagggctgtaacagttgctgctagtattagggttccacatcattctaatgtatagtttcaagtcttaatagacaatctgaattccactacatttcttttggctccaacattccttttagcttgaccagtctaatttaaaatgtgtttgttggaggtcattaacgttacttgtacaatgctgtcactgtgtgacatccatatgaattttggtatatatcaatcaatcaatcaatcaatcacattgcattcaatcaatcagctgtgattgattgattatgcttagaaatactatagtaactagatgcagtgtgaattttttccattaacaaacaaacaagtcagtggcttaaatgtgattatggtcctgcaaggtgattcttgctaaaatatctaaacttttgttttgttttaactgaatcattttttaacttaaaaagctggaaaatatcaaatgctgttttttttttcattgtcaacagtggtgtgtcattttatgtatgttcctaatgcttatggaactcctccaaaataaagttactcaaagagagcaaaaaaaaaaaaaaaaaagagatcagcatcacacaacgcataacacaaacaaagggccc

SEQ ID NO: 8030 - DNA, 3607 bp, Homo sapiens
  misc_feature (3482)..(3496): n is a, c, g, or t
gcggccgcccaggctgcccccgcccgcgcgcttcctgttggggggcccggggagcggcgcccgcggccgggccgcattgtgacgtagcggggccgcggcagcgcctccaccgcccgcctacttcggctgaggctgttctgctcctgccgctgcggtccgtcggtcggtcagtcagtcccttcgcgctcctgagccgccggcgcgccgggcgccccgggaatttataagtatttgaccgtactcaaaatgtgcaaggaagaataatggaagcccctgaataccttgatttggatgaaattgactttagtgatgacatatcttattcagtcacatcactcaagacgatcccagaactgtgccgaagatgtgatacgcaaaacgaagacagatcagcttctagctctagctggaattgtggcatctcaactcttattacaaacacgcaaaagcccacaggaatcgctgatgtgtacagtaagttccgcccagtgaagcgggtttcgccactgaaacatcagccagagactctggagaacaatgaaagtgatgaccaaaagaaccagaaagtggttgagtaccagaaagggggtgagtctgacctgggcccccagcctcaggagcttggccctggagatggagtgggcggcccaccaggtaagagctctgagcccagcacatcgctgggtgaactggagcactacgacctcgacatggatgagattctggatgtgccttatattaaatccagtcagcagcttgcctcttttaccaaggtgacttcagaaaaaagaattttgggcttatgcacaaccatcaatggcctttctggcaaagcctgctctacaggaagttctgagagctcatcatccaacatggcaccattttgtgttctttctcccgtgaaaagccctcacttgagaaaagcatcagctgtcatccacgaccagcacaagctgtccactgaagaaaccgagatctcacctcctctggttaaatgtggctctgcatatgagcctgaaaaccagagtaaagacttcctaaacaagacatttagtgatcctcatggtcgaaaagttgagaagacaacaccagactgccagctcagggccttccacctacaatcctcagcagcagaatccaaaccagaagagcaggtcagtggcctaaaccggaccagctcccaaggcccagaagaaaggagtgagtatctgaaaaaagtgaaaagcatcttgaacattgttaaagaaggacagatctctctcctgccacacctagctgcagacaatctagacaaaattcacgacgaaaatggaaacaatctattacatattgcggcgtcacagggacacgcagagtgtctacagcacctcacttctttgatgggagaagactgcctcaatgagcgcaacactgagaagttgactccagcaggcctggccattaagaatggtcagttggagtgcgtacgctggatggtgagcgaaacagaagccattgcagaactgagttgttctaaggattttccaagccttattcattacgcaggttgctatggccaggaaaagattcttctgtggcttcttcagtttatgcaagaacagggcatctcgttggatgaagtagaccaggatggcaacagtgccgttcacgtagcctcacagcatggctaccttggatgcatacagaccttggttgaatatggagcaaatgtcaccatgcagaaccacgctggggaaaagccctcccagagcgccgagcggcaggggcacaccctgtgctccaggtacctggtggtggtggagacctgcatgtcgctggcctctcaagtggtgaagttaaccaagcagctaaaggaacaaacagtagaacgtgtcacgctgcagaaccaactccaacaatttctagaagcccagaaatcagagggcaagtcactcccttcttcacccagttcaccatcctcacctgcctccagaaagtcccagtggaaatctccagatgcagatgatgattctgtagccaaaagcaagccaggagtccaagaggggattcaggttcttggaagcctgtcagcctccagccgggctagacccaaagcaaaagatgaagattctgataaaatcttacgccagttattgggaaaggaaatctcagaaaatgtctgcacccaggaaaaactgtccttggaattccaggatgctcaggcttcctctagaaattctaaaaagatcccactggagaagagggaactgaagttagccaggctgagacagctgatgcagaggtcactgagtgagtctgacacagactccaacaactctgaggaccccaagactaccccagtgaggaaggctgaccgaccaaggccgcagcccattgtagaaagcgtagagagtatggacagcgcagaaagcctgcacctgatgattaagaaacacaccttggcatcagggggacgcaggtttcctttcagcatcaaggcctccaaatccctggatggccacagcccatctcccacctcagagagcagcgaaccagacttagaatcccagtatccaggctcagggagtattcctccaaaccagccctctggtgaccctcagcagcccagccctgacagtactgctgcccagaaagttgccacaagtcccaagagtgccctcaagtctccatcttccaagcgtaggacatctcagaacttaaaactgagagttacctttgaggagcctgtggtgcagatggagcagcctagccttgaactgaatggagaaaaagacaaagataagggcaggactctccagcggacctccacaagtaacgaatcgggggatcaactgaaaaggccttttggagcctttcgatctatcatggagacactaagtggcaaccaaaacaataataataactaccaggcagccaaccagctgaaaacctctacattgcccttgacctcacttgggaggaagacagatgccaagggaaaccctgccagctccgctagcaaaggaaagaataaggcagcataatgacatcaatagaaaaatgaagaaatcctacagcataaagcacattgctgagccagagtcaaaagaactcttcttgtaaatcactttttaaattttctctcactgatgccctttggaaattattggaaatttctggactatcctctttggaaagagaaccatgaaaacaatgcctcaccagcagaagaacagaatatcaggatgccttaaatttatagtagtagactgtaaaagattcattttggggtgatatctgtatatataacttgtttttttaaaagatgccgtttaaaagcatgattgggaaaatgtatgttttttaagagtagattgattcaccctacccacaggacattcaccaagccactgataccattttatatttcatcaattgcatgagtatttgctaatgttgattgaacctccctttccccataatgtgggcagatttggctcagnnnnnnnnnnnnnnnaggtcagtggtattgtttctgtcaagagtgttttttctgtcatttctactttttgtataaaggaaataaaacaatgttaacagccaaaaaaaaaaaaaaaaaaaaaacgct

SEQ ID NO: 8031 - DNA, 3068 bp, Homo sapiens
gcaccggtcagtgtggggaagctgcagcctctgcacacagcagtgccaggagcccttcccttttccaaaagaagcctttaaagaagcctttgaggagggctgcaggaggggcaggactgggggttgttgtccccacgtgtgcccccacctcaggaagcagattccccagcacgccctaaccacgcccgaggctggtggacggaactgtgcaagaccagcctcccagttgaataggggggaagggcagccccgcccgcgtcagcgttggcgggagggcgcgtgggggagcctgcagtaactgctctgtccttctgtcttgcagctatgtctgggctggtagtcccgccaatgtgagggacttctgtttaccttccgcagcacccagcatcaaaggacggacttcaggggacacgtttagtatattaagacatgctgatggaaacagtatcttcaaaaaaatcagcagcaattgaaatgctacaaaagactttgtttaaagattttatttaaactattaagaatcaacatgcaaacagcctacttcttcatgaacaattccattttattgactgaacttttctcatattttcacatttctcagtcctgaagaataaggaaaacaaagcgacgcctattttgtataaagtttccgactccgtcttggccatgtctagtaattgctatgtgttgggagaaactttgtgaatgcaccattttgatgatcatgaaacgctgatgaaaaatgcctccaaacatttttctgtactcatacttagattcacaatggttgtgtatctctataatgtgaaatatttttttgtggtgataaaaagagggccaaggaggtatgagccatcagactggaaaaaaggatgactatatgatgaggagaaactggggtggcagggagggagggagggtttatcactgcttaacttcatcttcatgaaatgaaactttgtaacttattgtagttagaaattgtaactttgatattgaattctcttgccttcaacaagcacactgacagagaaaaaatgctactgtctgttggttccaatattctcccactgctagagcttcctgttaagcaagtgtgatctgcaacattttttcaacttttgctagcactgtatactattgcattcttaggctactgtgaggtctatgtttcttgtaccagaaattgtccttttgacttctagatccttcttccctaatgtgttttgtatgtggttataaaattgtagacttttgtgattttgccaaagttgtagctaaatatttatacacttgtcttgaatttttttcagatccacttaaaatatttagaaaaacaagttttattccttatgtgtcttataaggaataaaatggtcttcatttgacacttactttcccatgaacacttgcagttgctaagggactttattttgtaacatatcaattataaatattgtatttatctttgaaattttgtacattgcttttcccaccttttcctttttcttctttcttgtctgtattggtttttgatcacggcctggtgttgtgatactgggaagagcattagccaagaacttgtctctttgatctgtttcgttaagctgaaccagtgtctttacatttcatttgtacttcaaaaaatatgctattgtttagactttccatccttttttttttttattttgaggaaaagtcaaattcattgtttatttttatattatttttaagttatctgaacaaatacttttgaaaaaaaagtttgttgtatagtcaaaacaaatcggtgccacccggccgtgacaaatcctagtagattctgtgcatgtggagcggccgcgaagaggtgacaccgtttggggctgtgtccttattttattttatttttttgtagaatgtaaaaagtcattttagatgccacccattgactttgccacatagctgaactgtgtttactggaaaaattcagaggcctaaagtttaaaataaaatttacttctgatgttttaattaaaatgtttgccacattaacttttctgatgccttaaaagtgaacttctttaaagaacctttgtgctattttatcacaggcttacactacaattgttaataaatacttcatttggagatgtatggtgtaaaacacacaaacacacacaaaaaagcacaagcccgctgcatgacccgtctctcctttctgggactatttctgctgcgtcctgcaccctcctgggcccacctccgattcacagaggtttcagggggacccaaatcactgctggttttcaatttttttttaacaatacatttttgtggtcagttccaacagcactgtccgtacttttaaaactggaatgacctccttcagatatcgtgcctcttagtgccaaacccacagtgagaccaaaagtgtcaggtgttttttttttttttctttctcctttgcactaagtgctttgcagacacggcacagcaaacattttgcaaactgcagcagaaatcgaatttaaaacaaaaaggagggactttaaaataccttcttgacaaaaatcaacaatgcacaacttacaaagtgttcattctagggacaaaattaaataaacagaatgtccccaggagtcagcaggtcacagtctggctttgtgatggttgacaaggtctagctacatgggaaagcctgagaagtcactttggaactaaattgcctccattttattttgtacgagtaagggtttgatctacaaaagagctcacatggacgcactgagaacgcctgccagcttccccatgccctcacttggtttgtgttttaggttaagtagtcaatgcccacatcacttcactgtctcaagactgagcacttcactaaatggtagattttactgttaaagaccctacaataagattgttttatctgtacattttttcagatatttaactgtataaaaatgttcattttacacaatatttaattaaagtatttcttgtctgtgaatttcaaaaaaaaaaattttcaatgtttttgattattaaaatgactaaacactaaaaaaaaaaaaaaaaaa

SEQ ID NO: 8032 - DNA, 530 bp, Homo sapiens
ttttttttttttgatctaacatccatttattgagaagtttccacttgctgtacacttagattgcagccttagattttatatttggatcaaagttccatcacattgcatcattttcagaatatttgaacttttatttcaatacaaactgaggtaaataaatatcccccccaaatagacgctgatgttccatatctaacaagtaaccaaattgtcatgataatctgggatcactatctagactccatttatgaaagaaaatcttttatagatttcacaatagcctgattttcattttgtaaatgtgtctcattgttgagagtgtctttattcactcccattcaatgatgaagtgactctactgtttgaggcccaatgccacaagttaacttcatagaaatgagtcacgtccaatttggcccctagaagtgcttgccagcaatacagatgggcttattactagcacataaaattactttcattctttacctcctgtattagcttccaagaagggctccattggtttataatat

SEQ ID NO: 8033 - DNA, 5421 bp, Homo sapiens
  misc_feature (1861)..(1865): n is a, c, g, or t
  misc_feature (2487)..(2509): n is a, c, g, or t
tgtaacgtggagcctggtcgccccagcccgggagagggggaccctgcccgcaccctcctggtctggggagggcctagtggcagcccaggtgcagtgggccggaggccaggggagcccgtgtaggggaaccgcctggcctctgttcagtgtgcccctcccctgggtggggcttcaggcgctgagtcatggctttggttggggggcagcctcaccctcctccccgtcctccaagctgctgaggaaatcctgggctgagcacagcagaggaggcctaggtccccaggactgaggaagggagagctgaggggctcccagcagtgggagcggctctcggggcctctgccagggcccaccctgtccccatgagcacgtccgtgagctcctgggtgcagccatccccccttgctggctctccagggacacgggcgccccaaacccgagggcggcagctctgggtgcagctgtctctgcatccggccctgctcaggggtggctgcaactcctggggtgtggcgctctctgctgccttctcctgggaggatggtcccttctctgttctgggatcctccagctgaggtagaggtcagggtccaggggctgcaggctgggcactggcggtcagcggacaccacagcgagattccctccatcgccccctgcttcgggattcagagtcctcttagccccttgggaacaagagagggctgctcagagaggacctagtgtccttctggggtggctgggacccttcaaggtccctggctggggcagcctggtgcctgcagctccagctcctaattgaggacacgccccatgtaaaccacaggcccctcccccgaggcctgggacaccggtcagggtagcaaggtacgagggactgtaggccctgatggcctctgctcctggacccctgccctagacctggagtcctggccccagcccgggccctgtggtgcccaatccccaggaggccagatggcccggacagccagtgagccgattgtgtggagggctgccgggatcctggccctgtttccctgttgcctgctcccggagggggtggtcacgtgcccgatccatctgcctcctgtcttccggggattctcccgccgaggcttctctggtgatgtcatgccttaactcttctctccccaggcagccccactgtcaggctgtcctggtgggagtgggctctgaggaggatggcctacccgtctttccagcggaccatgccgcttgcagctgtgaggttgggggagccgggggcgtctctccccagctggtctgggtcctcctggtgctgccaggaccgagagcagctgccctactgcccccaccctgtcccacagtgcatgggcgccagacctggatgggctgcagtagtgcagtggggtgaggggaggtgccgcagggttgaggggctccagatgggtccagggttgactctgaactcctagaggagaggcgggtgaggctggctcagcccttggtgggcactgtccctgagggactcccagcggccggctgtcctgggagaggctggtccagccttcttccccgagggcacagcagcggctgcctctgcctgcctggggttgggggggcggggggaagtgcactgaacctggtcccagtcctgcccccgtagcaggcaggcgtctgtctcccagcctgtttcctgaaagccccttcccatggtggagcccctcagggaggtgcggggggaggtgaagccccgagggggctgaggctgcaggtgaccccagccagccccgttcttgctttagggcgaccattgacgaggtggagacggacgtggtggagattgaggccaaactggacaagctggtgaagctgtgcannnnnatggtggaagccggtaaggcctacgtcagcaccagcaggcttttcgtgagcggcgtccgcgacctgtcccagcagtgccagggcgacaccgtcatctcggaatgtctgcagaggttcgctgacagcctacaggaggtggtgaactaccacatgatcctgtttgaccaggcccagaggtccgtgcggcagcagctccagagctttgtcaaagaggatgtgcggaagttcaaggagacaaagaagcagtttgacaaggtgcgggaggacctggagctgtccctggtgaggaacgcccaggccccgaggcaccggccccacgaggtggaggaagccaccggggccctcaccctcaccaggaagtgcttccgccacctggcactggactatgtgctccagatcaatgttctgcaggccaagaagaagtttgagatcctggactctatgctgtccttcatgcacgcccagtccagcttcttccagcagggctacagcctcctgcaccagctggacccctacatgaagaagctggcagccgagctggaccagctggtgatcgactctgcggtggaaaagcgtgagatggagcgaaagcacgccgccatccagcagcggacgctgctgnnnnnnnnnnnnnnnnnnnnnnnccaaagtggagtttgacgtggacgcgcccagtggggtggtgatggagggctacctcttcaagagggccagcaacgctttcaagacatggaaccggcgctggttctccattcagaacagccagctggtctaccagaagaagctcaaggatgccctcaccgtggtggtggatgacctccgcctgtgctctgtgaagccgtgtgaggacatcgagcggaggttctgcttcgaggtgctgtcacccaccaagagctgcatgctgcaggctgactccgagaagctgcggcaagcctgggtccaggctgtgcaggccagcatcgcctccgcctaccgcgagagccctgacagttgctatagcgagaggctggaccgcacagcatccccgtccacgagcagcatcgactccgccaccgacactcgggagcgtggcgtgaagggcgagagtgtgctgcagcgtgtgcagagtgtggccggcaacagccagtgcggcgactgcggccagccggacccccgctgggccagcatcaacctgggcgtgctgctctgcattgagtgctccggcatccacaggagcctgggtgtccactgctccaaggtgcggtccctgacgctggactcgtgggagcctgagctgctaaagctgatgtgtgagcttggaaacagcgctgtgaatcagatctatgaggcccagtgtgagggtgcaggcagcaggaaacccacagccagcagctcccggcaggacaaggaggcctggatcaaggacaaatacgtggaaaagaagtttctgcggaaggcgcccatggcaccagccctggaggccccaagacgctggagggtgcagaagtgcctgcggccccacagctctccccgcgctcccactgcccgccgcaaggtccggcttgagcccgttctgccctgtgtggccgctctgtcctcagtgggcaccctggatcgtaagttccgccgagactccctcttctgtcccgacgagctggactcgctcttctcctacttcgacgcaggggccgcaggggctggccctcgcaagggtgcagagtcggaggagtccagcggtgaggcagacggggacactgaggccgaggcctggggcctggcggacgtgcgcgagctgcacccggggctcttggcgcaccgcgcagcgcgtgcccgcgaccttcctgcgctggcggcggcgctggcccacggggccgaggtcaactgggcggacgcggaggatgagggcaagacgccgctggtgcaggccgtgctagggggctccttgatcgtctgtgagttcctgctgcaaaacggagcggacgtgaaccaaagagacagccggggccgggcgcccctgcaccacgccacgctgctgggccgcaccggccaggtttgcctgttcctgaagcggggcgcggaccagcacgccctggaccaagagcagcgggacccgttggccatcgcagtgcaggcggccaacgctgacatcgtgacactgctccgtctggcgcgcatggcggaggaaatgcgcgaggccgaggctgcccctggtcccccgggcgccctggcgggcagccccacggagctccagttccgcaggtgtatccaggagttcatcagcctccacctggaagagagctagggccgggcaggccgggcagctgccaccccgcccggcccgacgccccgcatgccccgaagtccctggcgcccacccggccgcggccctgcgtgtgacccgcgggtcgatacctggcagccccagtgctggggcgccgcggccctgctcgcccaggaggagagcgagggccccacactgagtctcttgaagcctcacgtttccctgggggggtgctgcatcgtcgggtgtccctcaccccacctggggaacctctgtcttcaggtcaccccttttcaggggcctgggttgctcatgtcacaagccacttttaaggcccgtgtcacctgtgtccctgtgtcctcagggcctgtgttacttcgtgccccacttctgcccagaacactgacctgttagctggctccctcctgcacaccccagagcctcctcccagggcagaaagggtggcccatccagggaaccaacgagtacctcacttagtgaccccagcatccaggctggcgtcgcgggtgctgggcgggaggggctctggcctgggtcctcagccctggctggacgcgggcgtcccaaggccacgtggctggccacgaaggtccccgtgccagacagccccagccgcatcccggcctcctccggaggcaccttctcctggtactcggccctgtgcctgcgcataaagcccctttgccactttgcagccctcatctcatgttctttgtagcggaccgagtgggtttgctataggcctcgtctgactttgtcttgcgtcttttctctgtggactcttgaggacgcctgagccccagccctgcccctgaccagcctcccccttgggtccaggggtctttcggctcatattgcagggcctgccaatgccttcacgcaccccttccccaaaggtgcccggcagggaggcagggcctcccccactcagcgcaggtcaggctaaggccagtcggctggtcactatgcaatgctgccctggggaggctccctgagggcacagtgggcgctggacccggccccccaactctcttgcctgctgcctgtgaccctgaagaacagaattgattcttgcccctctccctgtgtgagcttggccccgcctcttgccccaggcccctgctggcgggtctcaccccccacccctcgctttgaataaagcacttgcgcccacaaaaaaaaaaaaaaaaaaaaaaaaaaacaaaaaaaggggggaccaccaaaaattagcccacagaaggggcgcaaaacaaaattaagtaccaagatttatca

SEQ ID NO: 8034 - DNA, 1566 bp, Homo sapiens
tggccggggactcactgtcaacaacatcccatcctgaagacttgcttaccacaactgagagtggggagtcagtttgaggcctagcatcacttaaacttcctccaaaggcacaaaagccagaagagaaaaatgaagacgggacattttgaaatagtcaccatgctgctggcaaccatgattctagtggacattttccaggtgaaggctgaagtgttagacatggcagataatgcatttgactgatgaatacctgaaactgtacggacaggatggaaattaaatacgttccccaactgctaaaggaggaaaaagcaagccaccagcaattagatactgtgtgggaaaatgcaaaagccaaatgggcagcccgaaagactcaaatctttctccctatgaattttaaggataaccatggaatagccctgatggcatatatttccgaagctcaagagcaaactcccttttaccatctgttcagtgaagctgtgaagatggctggccaatctcgagaagattatatctatggcttccagttcaaagctttccacttttacctcacaagagccctgcagttgctgagaaaaccttgtgaggccagttccaaaactgtggtatatagaacaagccagggcacttcatttacatttggagggctaaaccaagccaggtttggccattttaccttggcatattcagccaaacctcaggctgctaatgaccagctcactgtgttatccatctacacatgccttggagttgacattgaaaattttcttgataaagaaagtgaaagaattactttaatacctctgaatgaggtttttcaagtgtcacaggagggggctggcaataaccttatccttcaaagcataaacaagacctgcagccattatgagtgtgcatttctaggtggactaaaaaccgaaaactgtattgagaacctagaatattttcaacccatctatgtctacaaccctggtgagaaaaaccagaagcttgaagaccatagtgagaaaaactggaagcttgaagaccatggtgagaaaaaccagaagcttgaagaccatggtgtgaaaatccttgaacccacccaaatacctgaagataaaagtcaaggaaatatcaacaatcctactccaggtccagttcctgttccaggtcccaaaagccatccttctgcatcctcgggcaaactgctgcttccacagtttgggatggtcatcattttaatcagtgtttctgctataaatctctttgttgctctgtagtttgatgcattgtttatctttcttattctttacttgaaataactatagggatccacaggagatcaaaaggaatgatgtattttttacgtgttggccaaagtcactggataaaatgagaattgtatatttgttattcattttgcaaattcagaaagttggtccagatatatgtcacagaacttttcacttgtatactactcttacaatggaaaaaaatcccgaaaactgtatacttctgattaaattcaataaaagattttgattaggtaaaaaaaaaaaaaaaaaaaaaaaaaaaaaa

SEQ ID NO: 8035 - DNA, 4361 bp, Homo sapiens
  misc_feature (1427)..(1452): n is a, c, g, or t
  misc_feature (2323)..(2443): n is a, c, g, or t
  misc_feature (2558)..(2578): n is a, c, g, or t
  misc_feature (2682)..(2708): n is a, c, g, or t
gctggccctggtactgtgcactgtggacagccgcccgcccgcccagctggccctcagccacgccggtcgcctcttggcctcctcgacagcagcctctgtccccaacaccctgcgcctggagctgcgagggccacagcccagggatgagggtttctacagctgctctgcccgcagccctctgggccaggccaacacgtccctggagctgcggctggagggtgtgcgggtgatcctggctccggaggctgccgtgcctgaaggtgcccccatcacagtgacctgtgcggaccctgctgcccacgcacccacactctatacttggtaccacaacggtcgttggctgcaggagggtccagctgcctcactctcattcctggtggccacgcgggctcatgcaggcgcctactcttgccaggcccaggatgcccagggcacccgcagctcccgtcctgctgccctgcaagtcctctatgcccctcaggatgctgtcctgtcctccttccgggactccagggccagatccatggctgtgatacagtgcactgtggacagtgagccacctgctgagctggccctatctcatgatggcaaggtgctggccacgagcagcggggtccacagcttggcatcagggacaggccatgtccaggtggcccgaaacgccctacggctgcaggtgcaagatgtgcctgcaggtgatgacacctatgtttgcacagcccaaaacttgctgggctcaatcagcaccatcgggcggttgcaggtagaaggtgcacgcgtggtggcagagcctggcctggacgtgcctgagggcgctgccctgaacctcagctgccgcctcctgggtggccctgggcctgtgggcaactccacctttgcatggttctggaatgaccggcggctgcacgcggagcctgtgcccactctcgccttcacccacgtggctcgtgctcaagctgggatgtaccactgcctggctgagctccccactggggttgctgcctctgctccagtcatgctccgtgtgctctaccctcccaagacgcccaccatgatggtcttcgtggagcctgagggtggcctccggggcatcctggattgccgagtggacagcgagccgctcgccagcctgactctccaccttggcagtcgactggtggcctccagtcagccccagggtgctcctgcagagccacacatccatgtcctggcttcccccaatgccctgagggtggacatcgaggcgctgaggcccagcgaccaaggggaatacatctgttctgcctcaaatgtcctgggctctgcctctacctccacctactttggggtcagaggtgaggggagggggctccatctcccaggccactctgcacaaaagcccagctcttaggcccaaaggcttccttccctgtatccctcctgctgcnnnnnnnnnnnnnnnnnnnnnnnnnnctgattgctcggggcacccttgtgtggagagcttcagcgataaagcaaaagttagaaggtgtcatcttgggtgggtccccttggaaggaagcactgggggcctgcagctgtggctgctctgagtcccgctctgtgttccagccctgcaccgcctgcatcagttccagcagctgctctgggtcctgggactgctggtgggcctcctgctcctgctgttgggcctgggggcctgctacacctggaggtgggtctggagctgggagtgggccagaagattggggtaaggcagcccacctcgtcttctccccaaattcccccaggtcctttaggacctcctattaagttcacaggctgcctacttcccagactgcccctccaaattggaaatcccttctagaattgtccctaaatcctccttgctgtagtttctttctttcctcctctctgccctggctgtgctaaagcaagggctagggaggaagacagaggaagcacccactctccatgaggttcccacgctcttgtggtctggagccagcctgtggggagcgggagaggaatgggggcaggaggtggggaggggagaggctctctgagtccactccgggccttgcagaaggaggcgtgtttgtaagcagagcatgggcgagaattcggtggagatggcttttcagaaagagaccacgcaggtatccattcaacacacacgggcagatataatacccagctaacccacagtgccaactggcatctggagactgctgtcatttagaggatggtgcctgggaccaaggggaggttggggagagtgtgcagggaaccaggagcccctcaggagataggagagccctgttctgctcggggcagaggnnnnnnnnnnnnnnnnnnnnnnnnnnnnnnnnnnnnnnnnnnnnnnnnnnnnnnnnnnnnnnnnnnnnnnnnnnnnnnnnnnnnnnnnnnnnnnnnnnnnnnnnnnnnnnnnnnnnnnnnncttccccactcccaagcctgcccgtcacctgggcagaagtgaaagtcagtttctcctcccctgtggtgtgtcccttctgcagctgattcacctggtaggccagggctccaagtcnnnnnnnnnnnnnnnnnnnnncccaccaatcctcttgggaccccacctgaggctgggggcctgggggcctgccctggctcccagaggcctcctgtgaccagggttttctctgtgggaagctcatnnnnnnnnnnnnnnnnnnnnnnnnnnntgagacctcaacctgtgccccacccctgggctgaccagtggtgttgcctgccctccggaggagaaagtggccagaatctgtgatgactccagcctatgaatgtgaatgaggcagtgttgagtcctgcccgcctctacgaaaacagctctgtgacatctgactttttatgacctggccccaagcctcttgcccccccaaaaatgggtggtgagaggtctgcccaggagggtgttgaccctggaggacactgaagagcactgagctgatctcgctctctcttctctggatctcctcccttctctccatttctccctcaaaggaagccctgccctttcacatccttctcctcgaaagtcaccctggactttggttggattgcagcatcctgcatcctcagaggctcaccaaggcattctgtattcaacagagtatcagtcagcctgctctaacaagagaccaaatacagtgacttcaacatgatagaattttatttttctctcccacgctagtctggctgttacgatggtttatgatgttggggctcaggatccttctatcttccttttctctatccctaaaatgatgcctttgattgtgaggctcaccatggccccgctttgtccacatgccctccagccagaagaaggaagagtggaggtagaagcacacccatgcccatggtggacgcaactcagaagctgcacaggacttttccactcacttcccattggctggagtattgtcacatggctactgcaagctacaagggagactgggaaatgtagtttttattttgagtccagaggacatttggaattggacttccaaaggactcccaactgtgagctcatccctgagacttttgacattgttgggaatgccaccagcaggccatgttttgtctcagtgcccatctactgagggccagggtgtgcccctggcattctggttgtgggcttcctggaagaggtgatcactctcacactaagactgaggaaataaaaaaggtttggtgttttcctagggagagagcatgccaggcagtggagttgcctaagcagacatccttgtgccagatttggcccctgaaagaagagatgccctcattcccaccaccaccccccctacccccagggactgggtactaccttactggcacttacaagagtggagggcagacacagatgttgtcagcatccttattcctgctccagatgcatctctgttcatgactgtgtgagctcctgtccttttcctggagaccctgtgtcgggctgttaaagagaatgagttaccaagaaggaatgacgtgcccctgcgaatcagggaccaacaggagagagctcttgagtgggctagtgactccccctgcagcctggtggagatggtgtgaggagcgaagagccctctgctctaggatttgggttgaaaaacagagagagaagtggggagttgccacaggagctaacacgctgggaggcagttgggggccgggtgaactttgtgtagccgaggccgcaccctccctcattccaggctcattcattttcatgctccattgccagactcttgctgggagcccgtccagaatgtcctcccaataaaactccatcctatgacgcaaaaaaaaaaaaaaaaaaaaaaaaaaaaaaa

SEQ ID NO: 8036 - DNA, 2754 bp, Homo sapiens
agtcagaggttaacggaaaacggaagctggctggctgagaagaagcttccgttagtcctaccttgaagagaaaagagccagataaagagaaagattaaaagtatgagaaaatacagaagccactggtctcagggagacagagaaggataccaaagaagaagtaactattatgaggggccacacaccagccactcaagccctgcggaccggacacgtgaggaggtagtgacgccgacactgccagaacacactgctacaaggtcccagatggccacgtctctggattttaaaacttatgtagatcaggcatgtagagctgctgaggagtttgtcaatatttactatgagacaatggataaaagaagacgggcactaaccaggctgtatctggacaaggccaccttaatatggaatggaaatgctgtttcagggctggatgccctaaataatttttttgacacattgccttctagtgagttccaggtcaatatgttagattgccaaccagttcatgagcaagcaactcagtcccaaactacagttcttgttgtgaccagtggaactgtgaagtttgatggaaacaaacaacatttcttcaaccagaacttcctgctgactgctcagtccactcccaacaatactgtgtggaagattgcaagtgattgcttccgttttcaagattggtctagtagttaaaggggcaaaagtccattctcatttggtccattagttccagcaattgaaatttatgtgaattattttgattgtagaagcactataatatgtgctgaaactaaatttctttaatattttctattcctgtcagcaccttttctagcagctgccagtttggagcaattgcctctaagagctttaaaactatttttttacatgccttatatacattccactaatgacattcttataataatattaaacacatgatcttggtactaacatactcactgtgaacccagcctattgcaaaaataaaatctttttataatattatctatgggatgtcagcacaatataacactctgggaagaagtggagttttttggttattaggttaattttctagtaaaacacgttgcctgttttcagttaacactggtaatgccattttaatatatggctttttcaaatcagttcagtgaaaatagtacagatttaggtttacataactactctgacatactggaattgcatatagagatgttcagtggtcgtttttcattttaagtaatttttgttttggcatttttttgtgtgaagtaaattaatcaactagagaggtgcaaaacgttctcagttgatatctgagtattgggtgcatttggtggcttaaaagcaaagcttcctaaaaagatttttcttggcagctccaggtctatacatttaggtaatgaatggtagtagaactaatagctttaacaggagaatagggaatgagaaatagaaatccaaggctgaagccaaaagtaaggagggtggccaaatggtaaactattggtacttgttttctacctccaaaaaatgtagcttatttttaggatttaaatcactaagtaaataagtatccttgccaagtgatcatgagtgtcatttttgttctaagactaatatttttagatctttttacttcacctcatacttatcaccaatgtatatctccatttattcaataacttactggggtaaaataacagcaataaacctaaccttttaacagggtctaacatgagagttggagtcaaagccattgttatcttttggtgacacccttaaattttaagtcttccagtcttccatgtgaactttaggcccaaagtttcttatgtatcacacatcccccaaataagtgattttttcccagtgctttgtactgtcaactgcattatctttaattatttaaaggtagaattatttaattttgtgatttgttcttccatatgacattgagcaaatagatctgtttcaaaatatgttcccgctatgtggataactcttctttttaaaaagaaaatagagaatagcaaatcttcatgataatcctcaaaagaacaaaatgcttaactttatctcttaatttctaaaggtaaataacctaggttcagcttttgcttaaacattaaatatcttttccattttttaatgtttgtaagctagatatgccagctttgtttctacattgcaaccaaaaactgtttcttttcacttaattataaaaccagtaattcatttactcttgcccaaaactatacactgtatttctgttatagtaacaaaatagagttatgtagaattgtatggaactcaaatttaaaccatgctttcttgtagtactgattgaaacttacacgttttattctactcatagtgagcttattcttattttggattgattttccaaaaccacagcttcagcagcaacaatcagaatgtccaaatgctgtcctttcccttacagagaagaacaatggtaactaaaagctgcatataactagcaataactacattgaacggtgtgcattgttcatgattgttgtgttttaagacttgtatataaactgctttttccaaactctgtataacttttaaatggctggaactactcgtataaggactagactgtatttttgacatgctcctatttttgtaacttgaaaaaataaaattttgccttgtgacagataaaaaaaaaaaaaaaaaaaaaaaaaaattgtaaaaaaaaaaaaaagggcggccgct

SEQ ID NO: 8037 - DNA, 1746 bp, Homo sapiens
accttgtcctggcttcagcttccaactacaaagacagacttggtccttttcaacggttttcacagatccagtgacccacgctctgaagacagaattagctaactttcaaaaacatctggaaaaatgaagacttggcaatgaatttgaagaataccctggaagaagaaacatctacagaattagcattggaagctatcctccaagcaagaagtgtgttacttgccatctaaggaaagaaaggtgccaatattacacagcaagtttcagcgactacgccaagtactatgcacttgtctgctacggcccaggcatccccatttccacccttcatgatggacgcactgatcaagaaattaaaatcctggaagaaaacaaggaattggaaaatgctttgaaaaatatccagctgcctaaagaggaaattaagaaacttgaagtagatgaaattactttatggtacaagatgattcttcctcctcaatttgacagatcaaagaagtatcccttgctaattcaagtgtatggtggtccctgcagtcagagtgtaaggtctgtatttgctgttaattggatatcttatcttgcaagtaaggaagggatggtcattgccttggtggatggtcgaggaacagctttccaaggtgacaaactcctctatgcagtgtatcgaaagctgggtgtttatgaagttgaagaccagattacagctgtcagaaaattcatagaaatgggtttcattgatgaatataagaatagccatatggggctgttcctattggaggatacgttttcatcactggcccttgcatctggaactggtcttttcaaatgtggtatagcagtggctccagtctccagctgggaatattacgcgtctgtctacacagagagattcatgggtctcccaacaaaggatgataatcttgagcactataagaattcaactgtgatggcaagagcagaatatttcagaaatgtagactatcttctcatccacggaacagcagatgataatgtgcactttcaaaactcagcacagattgctaaagctctggttaatgcacaagtggatttccaggcaatgtggtactctgaccagaaccacggcttatccggcctgtccacgaaccacttatacacccacatgacccacttcctaaagcagtgtttctctttgtcagactaaaaacgatgcagatgcaagcctgtatcagaatctgaaaacgttatataaacccctcagacagtttgcttattttattttttatgttgtaaaatgctagtataaacaaacaaattaatgttgttctaaaggctgttaaaaaaaagatgaggactcagaagttcaagctaaatattgtttacattttctggtactctgtgaaagaagagaaaagggagtcatgcattttgctttggacacagtgttttatcacctgttcatttgaagaaaaataataaagtcagaagttcaagtgctattgtgttgtctgtattcattgatttcaggttccaggttttatcacagaaagaggtgtttgtgcaaagcaagtgcatgaataacattagggtggtcatggaggagaagaatctagaagtggttttggatttctgtcatgagaactccaaatactggaaccaacagctcagagtaggcaaaagcattgttcagaaaatgcaagtgaatcacgtttgagatgtttgcactctatgctgtccctccaagaaatgtttattacatttctc

SEQ ID NO: 8038 - DNA, 1915 bp, Homo sapiens
  misc_feature (13)..(13): n is a, c, g, or t
  misc_feature (41)..(41): n is a, c, g, or t
  misc_feature (1302)..(1302): n is a, c, g, or t
  misc_feature (1545)..(1545): n is a, c, g, or t
tgagcatccattntggtggatgagccaaccacatggccagnttctgggtgtgggcacagtgccacatcttccatcactttctgatatatcccaccaccactgaagagacagcctggagagagtgcaagaggaaggctgagaaggatgagcgtggtgaattccagcttcttcctgaccctgagcccacccccaaggtggccctcaacctttaagagtgggagagcaaaattgacggcttcgagcgcttcaccaagaagatggaccacagggcactcagctcaacttctcagccaatgagttgacatgcaagcagattatggtgacgggctttaagaaagagcatcagaaggtggccagctcttcagcctcagccaggtcttggagctggaccaggccatcacttcaccagagatgccttcaacaccgtcggtgagctctttgccaatcagcccagccaggaactggacccagtcatggacctgttagtgctgtctctgggacaccaggtcatcatcctggacatcatccacatacacaaggaagctcttaccaaagtcatggagagcaggcaacatgtggcagaagggaagacagagatgcagaggctgatgacatcagaatcacaggaacaggatttctttggacactgtggctgaaattcaccacttccatccaattccagtgagaaacatggactcacagatgcagcatttcttgcaacaagagatactattttttcaaaaggtcacccaggaattgatagtgttgaatgactagatactcgattgtgcactgtttccagttcaaggatgctttctacagcagaataataacactagcaaagagatagtgccaggtattggcggtagtacaaggatggctttgttctcaattgaaactcggctgaacatagaattgtgtaggaaacagttaatatggcgatagaatagaaacagtagcaaacatgacctaaaccatgctatgaattcctacactaccattgtaacttttggaagaatgataccacttactttattgctttttgaagtatgaatattttcgtgtatatgctgtagacctcaaaccctgtgaagagtctcaaagaagctggctggataaagcctgctgtggatgtctttatattcaaagattgatgatgcaatttgaatatgtgtcctcaccaaatctcatgttgaattatatttcctaatgtggaagttggatcctggtataaggtgattgaattatgaaggcaaatttctcatgaatggttcagcaccatccccttgtaccatccttacnataatgagtgacttctcatgacacctggtcattgaaaactctatgtcacctccctactctgcatgttttcctcttgccgtgtgagacaactgactctttctttgccttgcacaaagattgaaagatttctgaggcctcccagaagcagaagccctgtgcttcctgtccaccctgcagaaccgtgagccaattaaacctctttttcataatgaatcatacagaaaatggcaaatgaggactggnagcattgcctataaagatacctgaaaatgtggaagcagctttggaactaggtaatggacagaggttggaagagtttggagggctcaaaagaagacagatgagaaggtttggaccatcttagagactggttaaatggttgtgaccaaaatcctgacagaaacatggacagtgaaggccaggctgaggaggtctcagatagaaataagaagctttctggaaaatgtcttccttttggatatggaaagcttacacaatgcctgtaccaccactgtaccttagaagcagtgatcttgcattttatttcagaggcttataggcaaaagaggctgcagccttgactcagatgagactttgaaaaaaaaaaaaaaaa

SEQ ID NO: 8039 - DNA, 2690 bp, Homo sapiens
  misc_feature (113)..(127): n is a, c, g, or t
  misc_feature (495)..(520): n is a, c, g, or t
  misc_feature (1870)..(1892): n is a, c, g, or t
agttcactcagacacgcagctggaccggacagggcggcttccgggtttggcgcggcctttgtctcttgctgcagccggagctccggtctcgtcttcactgctgtttgtcctcnnnnnnnnnnnnnnnagactctgtggctctgtgacctgcaggtattgggagatccacagctaagactccaggaccctctggaagcctagaaatggtattgctgtgtctaatttagacctgatcacctgtctggagcaaggaaaagagccctggaatatgaagagacacgagatggtagccaaacccccagctatgtgttctcattttgccaaagaccttaggccagagcaatatataaaaaattctttccaacaagtgatactgagaagatatggaaaatgtggatatcagaaaggctgtgaaagtgtggatgagcataagttgcacaaaggaggtcacaagggacttaaccggtgtgtgacaactacccagagcaaaatagnnnnnnnnnnnnnnnnnnnnnnnnnnacgtgaaagtctttcataaatattcaaatgcaaagagacataagataagacatactggaaaaaatcctttcaaatgtaaagaatgtggcaaatcattttgcatgctttcacaactaactcaacatgagataattcatactggagaaaaaccctacaaatgtgaagaatgtggcaaagcttttaaaaagtcctcaaaccttacgaatcataagataattcatactggagagaaaccctacaaatgtgaagaatgtggaaaagcttttaaccagtcctcaactcttactagacataagataattcatactggagagaaactctacaaatgtgaagaatgtggcaaagcttttaaccggtcctcaaaccttactaaacataagatagttcatactggagagaaaccctacaaatgtgaagaatgtggcaaagcttttaaacagtcctcaaaccttactaatcacaagaaaattcatactggagagaaaccctacaaatgtggagaatgtggcaaagcctttaccctatcttcacaccttactacacataagaggattcatactggtgagaaaccctacaaatgtgaagaatgtggcaaagcttttagtgtattttcaacccttactaaacataagataattcatactgaagagaaaccctacaaatgtgaagaatgtggcaaagcttttaaccggtcctcacaccttactaatcataaggtaattcatactggagagaaaccctacaaatgtgaagaatgtggtaaagcctttaccaagtcctcaactcttacttatcataaggtaattcatactggaaagaaaccctacaaatgtgaagaatgtggtaaagcctttagtatattctcaatccttactaaacataaagtaattcatactgaagacaaaccctacaaatgtgaagaatgtggcaaaacttttaactactcctcaaattttactaatcataaaaaaattcatactggagagaaaccctataagtgtgaagaatgtggcaaaagctttattctgtcctctcatcttactacacataagataattcatactggagagaaaccctacaaatgtaaagaatgtggcaaagcttttaaccagtcctcaacccttatgaaacataagataattcatactggagagaaaccctacaaatgtgaagaatgtggcaaagcctttaaccagtccccaaaccttactaaacataagagaattcataccaaagagaaaccctacaaatgtaaataatgtgtcaaatcctttagtgtattttcaacttttattaaaacacaagataattcatactggagagaaatcctacaaatgtgataaatgtggnnnnnnnnnnnnnnnnnnnnnnntaatccttatgaaacaaaagataattcatactagagagaaaccctacaaatgtaaagaatgtggcaaagctgctgcagaggctggagttccggctggtgcccgggcagcgcttcgggctgcaggagcaggccacactcaagccactggaccccgtgctgtgcaccctgcggccccgcggctggcagcccgcacccccaccacccccctgctgagggggcctccaggcaggacgagactcctcgggcaagggccgtgcccgcccacctctgctgcccacggccacccacccttctcccctgccccgtcccctgggccacccttcacgctggcttccagcgggccctctgccgaccgcctgcttcacacccctcagcgctccctgtcgcctgcggactccatggcccttcctggactggcccttgcccaactcccagccaccaccactgtccctaccactgagcccttgcacaggccacttgctcagacgagacaccctaactcttgctcactccctaaagccctcttcaggggtcacctcctccaagaagccctccttgccaccccccgccggcaggggcccctcctctgtgctccctcggtcacctgtgctacctctaacaccacactgaccacactgtatcgtgagtgtccgttgacgtgaccaattgccctgccaggctgtcagcgcctcaagggtagggtctgcgtgtgatttgtctctgagccccctgtgcccacccagggcccggcacagagtcgatgctcaataaatgtgtgttgactgcatgaaaaaaaaa

SEQ ID NO: 8040 - DNA, 7172 bp, Homo sapiens
  misc_feature (17)..(17): n is a, c, g, or t
  misc_feature (25)..(25): n is a, c, g, or t
  misc_feature (37)..(38): n is a, c, g, or t
  misc_feature (42)..(42): n is a, c, g, or t
  misc_feature (54)..(54): n is a, c, g, or t
  misc_feature (69)..(70): n is a, c, g, or t
  misc_feature (72)..(72): n is a, c, g, or t
  misc_feature (146)..(147): n is a, c, g, or t
  misc_feature (800)..(823): n is a, c, g, or t
  misc_feature (1493)..(1524): n is a, c, g, or t
  misc_feature (3116)..(3137): n is a, c, g, or t
  misc_feature (3545)..(3603): n is a, c, g, or t
  misc_feature (4107)..(4230): n is a, c, g, or t
  misc_feature (4732)..(4781): n is a, c, g, or t
  misc_feature (5349)..(5421): n is a, c, g, or t
  misc_feature (7056)..(7171): n is a, c, g, or t
tggggcgtgtgtggaanaacgttantgcccagcgganntagnggccccggagcncgaccgcagcggcannancgacaacagcggcgacgacgacgacgacgaggtggggggaggacggcgtgcgagagactcacgggacgcgacgnnccccgcctcccccgtccggtccctctctccacggtaaggggatgacgtagctttgccaaagacttagaagctaagcagaaaatgagcttaacatcctggtttttggtgagcagtggaggcactcgccacaggctgccacgagaaatgatttttgttggaagagatgactgtgagctcatgttgcagtctcgtagtgtggataagcaacacgctgtcatcaactatgatgcgtctacggatgagcatttagtgaaggatttgggcagcctcaatgggacttttgtgaatgatgtaaggattccggaacagacttatatcaccttgaaacttgaagataagctgagatttggatatgatacaaatcttttcactgtagtacaaggagaaatgagggtccctgaagaagctcttaagcatgagaagtttaccattcagcttcagttgtcccaaaaatcttcagaatcagaattatccaaatctgcaagtgccaaaagcatagattcaaaggtagcagacgctgctactgaagtgcagcacaaaactactgaagcactgaaatccgaggaaaaagccatggatatttctgctatgccccgtggtactccattatatgggcagccgtcatggtggggggatgatgaggtggatgaaannnnnnnnnnnnnnnnnnnnnnnnaacctgaagaaaaaaaccatgaagctggaacatcagggtgcagcatagatgccaagcaagttgaggaacaatctgcagctgcaaatgaagaagtactttttcctttctgtagggaaccaagttattttgaaatccctacaaaagaattccagcaaccatcacaaataacagaaagcactattcatgaaatcccaacaaaagacacgccaagttcccatataacaggtgcagggcatgcttcatttaccattgaatttgatgacagtaccccagggaaggtaactattagagaccatgtgacaaagtttacttctgatcagcgccacaagtccaagaagtcttctcctggaactcaagacttgctggggattcaaacaggaatgatggcacccgaaaacaaagttgctgactggctagcacaaaacaaccctcctcaaatgctatgggaaagaacagaagaggattctaaaagcattaaaagtgatgttccagtgtacttgaaaaggttgaaaggaaataaacatgatgatggtacgcaaagtgattcagagaacgctggggctcacaggcgctgtagcaaacgtgcaactcttgaggaacacttaagacgccaccattcagaacacaaaaagctacagaaggtccaggctactgaaaagcatcaagaccnnnnnnnnnnnnnnnnnnnnnnnnnnnnnnnngggcatggtgttccacatgggaaattgttaaaacagaaatcagaggagccatcggtgtcaatacccttcctacaaactgcattattaagaagttcagggagtcttgggcacagaccaagccaggagatggataaaatgttaaaaaatcaagcaacttctgctacttctgaaaaggataatgatgatgaccaaagtgacaagggtacttataccattgagttagagaatcccaacagtgaggaagtggaagcaagaaaaatgattgacaaggtgtttggagtagatgacaatcaggattataataggcctgttatcaacgaaaaacataaagatctaataaaagattgggctctcagttctgctgcagcagtaatggaagaaagaaaaccactgactacatctggatttcaccactcagaggaaggcacatcttcatctggaagcaaacgttgggtttcacagtgggctagtttggctgccaatcatacaaggcatgatcaagaagaaaggataatggaattttctgcacctcttcctttagagaatgagacagagatcagtgagtctggcatgacagtgagaagtactggctctgcaacttccttggctagccagggagagagaaggagacgaactcttccccagcttccaaatgaagaaaagtctcttgagagccacagagcaaaggttgtaacacagaggtcagagataggagaaaaacaagacacagaacttcaggagaaagaaacacctacacaggtataccagaaagataaacaagatgctgacagacccttgagtaaaatgaacagggcagtaaatggagagactctcaaaactggtggagataataaaaccctacttcacttaggcagctctgctcctggaaaagagaaaagtgaaactgataaggaaacttctttggtaaagcaaacattagcaaaacttcaacaacaagaacaaagggaggaggctcagtggacacctactaaattgtcttccaaaaatgtttcaggtcagacagataaatgtagggaggaaacttttaaacaagaatcacaacctccagaaaaaaattcaggacattctacaagcaaaggagacagagtggcacaaagtgagagcaagagaagaaaagctgaggaaattctgaaaagtcagactccaaagggaggagacaagaaggaatcctccaagtcattagtgcgacaagggagcttcactatagaaaaacccagcccaaacatacccatagaacttattccccatataaataaacagacttcctctactccttcttctttagcattaacatctgcaagtagaatacgagaaagaagtgagtctttggatcctgattctagtatggacacaacccttattctaaaagacacagaagcagtaatggcttttctagaagctaaactacgtgaagataataaaactgatgaaggaccagatactcccagttataatagagacaattctatttcaccagaatctgatgtagatacagctagtacaatcagtctggttactggagaaactgaaagaaagtcaacccaaaagcgaaagagtttcactagcctctnnnnnnnnnnnnnnnnnnnnnnttctccttccaaagatgttacaaaatcatcatcttcaggtgctagggaaaaaatggaaaagaaaacaaaaagtcgttccacagatgtgggttcaagagcagatggtcgtaaatttgttcagtccagtgggagaataagacagccctcagtagacttaacagatgatgaccaaacctctagtgtacctcattctgccatctctgatattatgtcatctgatcaagaaacttactcttgtaaacctcatggacggactccacttacctcagctgatgagcatgtacattccaaactggaaggaagtaaagtaacgaaatctaagacttctccggtggtatctggttcatctagtaaatcaaccacccttccaaggccacgacctaccaggacttccctcttgcgcagagnnnnnnnnnnnnnnnnnnnnnnnnnnnnnnnnnnnnnnnnnnnnnnnnnnnnnnnnnnncttctgaagtatccacaacaagttctacatcaaaacctcccacaggaaggcgtaacatctctcggattgatttattggctcagcctcgtagaacacgacttggctcactgtcagctcgtagtgactctgaagcaacaatttctagaagtagtgcctcttcgaggaccgcagaagccatcattagaagtggagccagactagtaccatcagataaattttctcctagaattagagctaacagtatctctcgactctcagactccaaggtcaaaagtatgacctcagctcatggctctgcttcagtaaattcaagatggaggcgctttcctactgattatgcttccacctcagaagatgaatttggatcaaaccgtaattcccctaaacatacccgtctacgtacttctccagccctgaaaaccactcgcttgcagagcgctggatcagcaatgcctactagttcttcattcaaacaccggattaaagagcaggaagactacatcnnnnnnnnnnnnnnnnnnnnnnnnnnnnnnnnnnnnnnnnnnnnnnnnnnnnnnnnnnnnnnnnnnnnnnnnnnnnnnnnnnnnnnnnnnnnnnnnnnnnnnnnnnnnnnnnnnnnnnnnnnnnctagtaccacagtaagcactgctgccaccacccctggctctgccatagacactagagaagagttggttgatcgtgtttttgatgaaagcctcaacttccgaaagattcctccattagttcattccaaaacaccagaaggaaacaacggtcgatctggtgatccaagacctcaagcagcagagcctcccgatcacttaacaattacaaggcggagaacctggagcagggatgaagtcatgggagataatctgctgctgtcatccgtctttcagttctctaagaagataagacaatctatagataagacagctggaaagatcagaatattatttaaagacaaagatcggaattgggatgacatagaaagcaaattaagagccgaaagtgaagtccctattgtgaaaacctcaagcatggagatttcttctatcttacaggaactgaaaagagtagaaaagcagctgcaagcaatcaatgctatgattgatcctgatggaacttnnnnnnnnnnnnnnnnnnnnnnnnnnnnnnnnnnnnnnnnnnnnnnnnnnctccaccgaaacagaagtccagccctgtgaataaccaccacagcccgggtcagacaccaacacttggccaaccagaagctagggctcttcatcctgctgctgtttcagccgcagctgaatttgagaatgctgaatctgaggctgatttcagtatacatttcaatagattcaaccccgatggggaagaggaagatgttacagtacaagaatgactttctcttgattgttgaaaaatcattacctgtggaatggctaggaatattggaagcagcatagtgttgatgtacgcaaaacaagacagcttggtcagctacaatcttggaatccctgtcttcttaattttatttatttatttttgacgtataatgtagtatatcaatcctttcaaactatttagataaccacttgatgcacaaataggaaaaagcagattgtggcagtgtcgccttttgtggttttatgattttcaaattgaatttaatgattacaccctttcccttcatagatcttttttcttttttttaagccatgctgtgacctacaagcaaactaaatagccaacatttcnnnnnnnnnnnnnnnnnnnnnnnnnnnnnnnnnnnnnnnnnnnnnnnnnnnnnnnnnnnnnnnnnnnnnnnnntgttaaaccattctatttgcttcttaataataggatttatattagtactcattaccattggacacaatgacataagtactctccacagtaaagcagacctttcacaacagtcactctgtgtcctaaaattttccaacatagatgtgatttatataactttgttgatacgtaaattgtcttggggtttacggaaattaactattatgtttgcactaagatttgctgggagtggtaggtggacatatctatatatcaataaggactaaccgtcttttttgtacataggggattgataatactgtatttgttttaagcccacagtgtttttactccactttcaaaaagtcaatttgggcactttttttcatttttttttaatgggaataagatttggtctctcattttaggttaaatgataactagaaagattaaactagacagatagtttaggtggagtatatttttaaaactcagaacatgtatattggtcctgtgttaccaagtttatatgtgacagttgaaaaagaaattcccttgaaatgatcatgaggttaaaattttcttcattaggggacttggagaaccagtagtcgtaagattagttgatagtttcactcccaagcaatgaattgcttctgtgtgtttccctgtaggactcaatagtaaatgctgtctgtcttacacatttataaggaccctgcaagacgacgacaaaggcctttggcctgtgctactaaacaagaagcctatgaaaaatttcttctttaaacttgttttttctctttccagtaagttcacatttggataattttaaaaagaaaagtaattacctttgtgtttccagaacactataattggggtgtatcttaattcagttaaatattattagtagacctggattttcccccttgaccccatcagtctataaaggttaaactgcaacttttatgaaatggtctttaatatttccacaataatcctgtgctatatttgttttaagaaacaaagtaactctatacacttcaagactttacaggattttttaaatcctgtattgttggatcaattaataaagatgcaaaaaaactttatagagatgtaaaaacaaaactataatggatctcctatttttctttaaatacaaaaaaaaaaaggtaaatgaactattctccttgtaaagctaaattccccattctgtctaataaaggaagactgaaaaaaggttttaaagaacataaatggaaagatacaaatgctttgaaggaataaacgaaatgttaaaacagggtcaatccatttgaagaaaaagttggacaaaataatcagcattgctccctcttttatttaatatttgggtactgattatatccacatggaagtagaaggtaaggagtttaggaaaatactagaatctactctgcttacattcttgtttaagtgtttacacagtttggttcaattataaacatttggccttttactatgttatttttattttgtatgaatacattatcctccttatttatttttgttacatttattacttatgttattttgttatgcatttacaactccatttttaaataaagtgtttctggaactttaaaaaaaaaaaaaaaaaaaaaaaaaaaaaannnnnnnnnnnnnnnnnnnnnnnnnnnnnnnnnnnnnnnnnnnnnnnnnnnnnnnnnnnnnnnnnnnnnnnnnnnnnnnnnnnnnnnnnnnnnnnnnnnnnnnnnnnnnnnnnnnnt

SEQ ID NO: 8041 - DNA, 2166 bp, Homo sapiens
gactgcatccacgcccgctgactgcatccaacgccgctgactgcatccaacgccgcctgactgcatccaacgccgcctgactgcatccaacgccgcccgactgcatccaacgccgcctgactgatccaacgccgcctgactgcatccaacgccgcctgactgcatccaacgccgcctgactgcatccaacgccgcctgactgcatccaacgccgcctgactgccaacgccgcctgactgcatccaacgccgcgagcagtacctggagctggtgagcgccgcgttgcggcggcccggcccctacctggtgctctacatggtggacctgctggacctgcccgacgccctgctgcccgacttgcccgcgctggtgggccccaagcagctgatcgtgctgggaaacaaagtggacctcctgccccaggatgctcctggctaccggcagaggctgcgggagcgactgtgggaggactgtgcccgcgccgggctcctgctggccctggccaccaagggccacagcgccccgtcaaggacgagccacaggacggggagaatccgaatccgccgaactggtcccgcacagtggtcagggacgtgcggctgatcagccgccaagaccggctatggagtggaagagttgatctctgcccttcagcgctcctggcgctaccgtggggacgtctacttagtgggcgccaccaacgccggcaaatccactctctttaacacgctcctggagtccgattactgcactgccaagggctccgaggccatcgacagagccaccatctccccttggccaggtactacattaaaccttctgaagtttcctatttgcaacccaactccttacagaatgtttaaaaggcatcaaagacttaaaaaagattcaactcaagctgaagaagatcttagtgagcaagaaacaaaatcagcttaatgtcctcaaaaagcatggttatgtcgtaggaagagttggaaggacattcttgtattcagaagaacaggaaggataacattccctttgagtttgatgctgattcacttgcctttgacattggaaaatgaccctgttatgggtacacacaaatccaccaaacaagtagaattgactgcacaagatgtgaaagatgcccactggttttatgacacccctggaattacaaaagaaaattgtattttaaatcttctaacagaaaaagaagtaaatattgttttgccaacacagtccattgttccaagaacttttgtgcttaaaccaggaatggttctgtttttgggtgctataggccgcatagatttcctgcagggaaatcagtcagcttggtttacagtcgtggcttccaacatcctccctgtgcatatcacctccttggacagggcagacgctctgtatcagaagcatgcaggtcatacgttactccagattccaatgggtggaaaagaacgaatggcaggatttcctcctcttgttgctgaagacattatgttaaaagaaggactgggggcatctgaagcagtggccgacatcaagttttcctctgcaggttgggtttcagtaacacctaattttaaggacagactgcatctccgaggctatacacctgaaggaacagttttgaccgtccggccccctctcttgccatatattgttaacatcaaaggacagcgcatcaagaaaagtgtggcctataaaaccaagaagcctccttcccttatgtacaacgtgaggaagaagaaaggaaagataaatgtatgagaccgaccttgttcactccagatattaactgtattgaacacaacaaaatacattgaatttgtattaaacatataacgcataaataaagctcccattcttacccttaaaaaaaaaaaatctttaatcccgagacggggcccgtctgtgccggttgagtgcgggcgaactttggcccgggaccaaccccagggagagaactcttggctacagccccagtagtggtggacaggctgggcgattcccggagttcgtctctcaacacaggcgacattagggcacgggcaaccaagcagaggacgcacgccgagacctaggcgcagagaaggataacacaggcaggagacaaaacaggagggcagtactgcagatgccccgagttgcatgacgaccccgcaaccagagggggcg

SEQ ID NO: 8042 - DNA, 3780 bp, Homo sapiens
agcgggctgcacgcggactgggcggaacccgccaacctctatgctgactcgcactggagggcggccgagcgcttcctgcagttcgagatcgcctggttcgccgagccgctcttcaagaccggggactaccccgcggccatgagggaatacattgcctccaagcaccgacgggggctttccagctcggccctgccgcgcctcaccgaggccgaaaggaggctgctcaagggcacggtcgacttctgcgcgctcaaccacttcaccactaggttcgtgatgcacgagcagctggccggcagccgctacgactcggacagggacatccagtttctgcaggacatcacccgcctgagctcccccacgcgcctggctgtgattccctggggggtgcgcaagctgctgcggtgggtccggaggaactacggcgacatggacatttacatcaccgccagtggcatcgacgaccaggctctggaggatgaccggctccggaagtactacctagggaagtaccttcaggaggtgctgaaagcatacctgattgataaagtcagaatcaaaggctattatgcattcaaactggctgaagagaaatctaaacccagatttggattcttcacatctgattttaaagctaaatcctcaatacaattttacaacaaagtgatcagcagcaggggcttcccttttgagaacagtagttctagatgcagtcagacccaagaaaatacagagtgcactgtctgcttattccttgtgcagaagaaaccactgatattcctgggttgttgcttcttctccaccctggttctactcttatcaattgccatttttcaaaggaagaagagaagaaagttttggaaagcaaaaaacttacaacacataccattaaagaaaggcaagagagttgttagctaaactgatctgtctgcatgatagacagtttaaaaattcatcccagttccatatgctggtaacttacaggagatatacctgtattatagaaagacaatctgagatacagctgtaaccaaggtgatgacaattgtctctgctgtgtggttcaaagaacattcccttaggtgttgacatcagtgaactcagttcttggatgtaaacataaaggcttcatcctgacagtaagctatgaggattacatgctacattgcttcttaaagtttcatcaactgtattccatcattctgctttagctttcatctctaccaatagctacttgtggtacaataaattatttttaagaagtaaaactctggggctggacgctgtggctcacacctgtaatctcagcactttgggaggccgaggcggggagatcacctgaggtgaggagttcgagaccagcctggccaacatggtgaaaccatgtctctactaaaaatacaaaaaattagccaggcgtggtgacagtggcacctgtaatcccagctacttgggaggctgaggcagaagtttgaacccaggaaacaggttacagtaggccaaattgcgccactgcactccagcctaggcgacaacagcaagactgtgtccaaaaaaaaaaaaaaaaagcaaaagcaaaactttgttttgttagactctacagcagagatttaacacccttctttaaactgggtagtcagtgatagataatatatattctgtcacttctaataaggtgccttctcctttaggtcagggtggttctaaaatggaaagaaaacacaatagggtaagtagtgcttgtctaagccagttacaacacagactcttaaagaggatcaagcccttcatttttctaacaacaaaaaatcacctatagaatatctaatttgtgatcttttactagatctgattttttaaaataatgtaatttccggccaggcacggtggcaccgcctgtaatcccagcactttgggaggccaaggcaggtggatcacctgaggttaggagttcgagactagcctggccaacatggcaaaaccccatctctactaaaaatacaaaagttagccgggcatggtggtgggcacctgtaatcccagctactcaggaggccgaggcaggagaatcgcttgaacccgagaggcagaggttgcaatgagccaagatcgtgccattgcactccagcctgggggacagggcaagactgtctctcaaaataaaaaaaaataataaaaataaaaataaaagtaatttccaaaacctcatctcatggaaagatcacaggatgaaggaaagctagactcaactctgtgaatagaagttgctatactgtaagtaaagcaacaattcagaatactgaatgagtttaaattgttttatatagcacccttttgggctagggttaattactagatctgacttggataatttgacactttgggaaatgaactctgttcttgagacttattcagtgtattttaaacatctgaggaagaaaacttaaatatgcacctatttatacctattctttctttaggtcaacatttaacacccactgcatacattaatttgtccttgtctgctcactccagcaatttagaccttaacagtcacaagagacgttcttctgttacaaagccttagtaaattaaggcagttttgattatattctaggtccacctatgtctgaagctaaattcagtatctaactgctaatgaacaagtttccaaaatactgtaaaaatacaattagtcaatttgagtaaatgcaaatatgatgagaaatcaatttactatttggcctggcaaatgggaacagtaaaattctgctttactcttctctagtctccttgccccagctgcacccactaccccaaagttggcagttttgaggtatgattttcaaggaatttttttagtattaacatctccctctgagaactatgtacctaaggtcacgcatacaactagtcaattctgtttttattactctaactatgtagaaacagtaagtcacttaaaacaatcacttggctgggttttttcccctttgtgccacattgattcaccctgacccaagaactccagggaaaattctttcatgtcaactgggcaactcattaacctctctttaacatcaagggcttgggaaaaaaaaaaaaaaaggtcagccacaggaataacaaaaacctggaatttatctttcaggttttgctttctctttctcactttgtttaaagtatctcgtactcacagttcacaaattaaccttcactgtctctttcacattaagagcttatgcttaaagcatgccccccttttctaacttgctggtttaccataaactcccctaagtaataaaattcctaacccagtactgagagtcctccttctctgccacttgggcattattttactagtttttaagccatcatcgcacaagaatccaaaaacccttaaattttttaaccactggcaaatatgtacagcaaattaggttaagcatttaatctggctcatgctctatcatactaaatattcaggtttatcataaactccttaaaaaccatcaaaggtcaaccagaaactgataactcttgaaaggagcaaacacgtaagatctttggagtttaagcttttctgagatgtgttgtgaaaaatctaacgtgtttatcgtatattcaatgtaacaacctggagaatcacaactatatttaaagagcctctggaaaatgaggccagtacagtgtgactacatgtttaattttcaatgtaatttattccaaataaactggttcatgctgaccacttgtattcaactaaaaaaaaaaaaaaaa

SEQ ID NO: 8043 - DNA, 3060 bp, Homo sapiens
agcggagagcgtcccccggcgaggacgagcgagcacggcgcccgcacctccccgcaccgcccgcgctgcgcgcccggaggagcgaccgccgcagttctcgagctccagctgcattccctccgcgtccgccccacgcttctcccgctccgggccccgcaatggcccaggcagtgtggtcgcgcctcggccgcatcctctggcttgcctgcctcctgccctgggccccggcaggggtggccgcaggcctgtatgaactcaatctcaccaccgatagccctgccaccacgggagcggtggtgaccatctcggccagcctggtggccaaggacaacggcagcctggccctgcccgctgacgcccacctctaccgcttccactggatccacaccccgctggtgcttactggcaagatggagaagggtctcagctccaccatccgtgttgtcggccacgtgcccggggaattcccggtctctgtctgggtcactgccgctgactgctggatgtgccagcctgtggccaggggctttgtggtcctccccatcacagagttcctcgtgggggaccttgttgtcacccagaacacttccctaccctggcccagctcctatctcactaagaccgtcctgaaagtctccttcctcctccacgacccgagcaacttcctcaagaccgccttgtttctctacagctgggacttcggggacgggacccagatggtgactgaagactccgtggtctattataactattccatcatcgggaccttcaccgtgaagctcaaagtggtggcggagtgggaagaggtggagccggatgccacgagggctgtgaagcagaagaccggggacttctccgcctcgctgaagctgcaggaaacccttcgaggcatccaagtgttggggcccaccctaattcagaccttccaaaagatgaccgtgaccttgaacttcctggggagccctcctctgactgtgtgctggcgtctcaagcctgagtgcctcccgctggaggaaggggagtgccaccctgtgtccgtggccagcacagcgtacaacctgacccacaccttcagggaccctggggactactgcttcagcatccgggccgagaatatcatcagcaagacacatcagtaccacaagatccaggtgtggccctccagaatccagccggctgtctttgctttcccatgtgctacacttatcactgtgatgttggccttcatcatgtacatgaccctgcggaatgccactcagcaaaaggacatggtggagaacccggagccaccctctggggtcaggtgctgctgccagatgtgctgtgggcctttcttgctggagactccatctgagtacctggaaattgttcgtgagaaccacgggctgctcccgcccctctataagtctgtcaaaacttacaccgtgtgagcactccccctccccaccccatctcagtgttaactgactgctgacttggagtttccagcagggtggtgtgcaccactgaccaggaggggttcatttgcgtggggctgttggcctggatcatccatccatctgtacagttcagccactgccacaagcccctccctctctgtcacccctgaccccagccattcacccatctgtacagtccagccactgacataagccccactcggttaccacccccttgaccccctacctttgaagaggcttcgtgcaggactttgatgcttggggtgttccgtgttgactcccaggtgggcctggctgcccactgcccattcctctcatattggcacatctgctgtccattgggggttctcagtttcctcccccagacagccctacctgtgccagagagctagaaagaaggtcataaagggttaaaaatccataactaaaggttgtacacatagatgggcacactcacagagagaagtgtgcatgtacacacaccacacacacacacacacacacacacacagaaatataaacacatgcgtcacatgggcatttcagatgatcagctctgtatctggttaagtcggttgctgggatgcaccctgcactagagctgaaaggaaatttgacctccaagcagccctgacaggttctgggcccgggccctccctttgtgctttgtctctgcagttcttgcgccctttataaggccatcctagtccctgctggctggcagggggctggatggggggcaggactaatactgagtgattgcagagtgctttataaatatcaccttattttatcgaaacccatctgtgaaactttcactgaggaaaaggccttgcagcggtagaagaggttgagtcaaggccgggcgcggtggctcacgcctgtaatcccagcactttgggaggccgaggcgggtggatcacgagatcaggagatcgagaccaccctggctaacacggtgaaaccccgtctctactaaaaaaatacaaaaagttagccgggcgtggtggtgggtgcctgtagtcccagctactcgggaggctgaggcaggagaatggtgcgaacccgggaggcggagcttgcagtgagcccagatggcgccactgcactccagcctgagtgacagagcgagactctgtctccaaaaaaaaaaaaagaagaggttgagtcagcagggacttgggttccctgtgtgtgaggggggcattcttgcctgccagctgctcccgaggtggccttgagaaggaagaagcaggatgacagagcctgagcagcggaaccagcctgcaccctcccttctggcccagcgacctgggctgtggctgagacaataatgaggccagaagtagccggagcctgtcaggaagggcaggggaggactgtggggtctgggctctgtcgctgtaaccatctgctcccaggctgtgtgcagaaaatggcatttacactattgtgcagctcattctcatgaaatactgccattgttgctaaataaagcttgtgtgctctgaatatagccaagcataaaaaaaaaaaaaaaaaaaaaaatattgtgtaaaatgcgtgaaatattacccaaagtataaccacctcgaggggg

SEQ ID NO: 8044 - DNA, 1523 bp, Homo sapiens
ggagtgagtggacacttggggagggagggtgacgttaaatctgttgtcgaggggggaaaggggttggcctccggtggggaaccgggcccatatatgtttatggtgtggggagtgccctaaaactcaggacaagattgtgggaagggccgcataaaaaagggtggcagaactttaaagaggcaccgctattgtggaaagagccggaggccgggagaaaaaggctggtgttggggggaaaaaagtgggggggaacccggcgggctcttgggttcgagcctggggggcagcgtggaaaatggggcgggtttctgccaaaagcctctcaatttttcttaccacaggcaatgggtttgggggggggggtgcaaaaataccaacccctgaaaatgtccgcggtgccacaaggaataccagccgcaattggggcttgataccagtgatgcaatggggcccaggggcgtggaaagttcaactcagggtattgagtggaacacgttgtgggatgcccagaggacaatacccaggcgcggctgcagcaagatttttcccgggattgaggtgacggtcaaggccaaagcagatgccctctacccggtggttagtgctgccagcatctgtgccaaggtggcccgggaccaggccgtgaagaaatggcagttcgtggagaaactgcaggacttggatactgattatggctcaggctaccccaatgatcccaagacaaaagcgtggttgaaggagcacgtggagcctgtgttcggcttcccccagtttgtccggttcagctggcgcacggcccagaccatcctggagaaagaggcggaagatgttatatgggaggactcagcatccgagaatcaggagggactcaggaagatcacatcctacttcctcaatgaagggtcccaagcccgtccccgttcttcccaccgatatttcctggaacgcggcctggagtcagcaaccagcctctagcagctgcctctacgcgctctacctgcttccccaacccagacattaaaattgtttaaggagaaccacacgtaggggatgtacttttgggacagaagcaaggtgggagtgtgctctgcagccgggtccagctacttccttttggaaccttaaatagaatgggtgttggttgattaattttaaaaaaaaaaaaaaaaaaaaaaaaaaaaaaaaaaaaaaaaaaagggggggggggttaaaaattccccgccgaggggggcgcccaagttataaggctggaacccaaggtttttgcgacaaggggggccctataagggaaaagggagattaaaaacgtagaggcacgggacggggtgttaaacaagttgttgtgatgtgggccaaactgggacagctgggagacctttggagaggcgaccctacctcgtggggggtgggcaatacggggccaccaaccaacaggagataaagcgctcagggaattataaactttagtgttagtggtacaacgggatatgctgcgtcgaagttggtacgggtgtttgaactta

SEQ ID NO: 8045 - DNA, 975 bp, Homo sapiens
ttttttttttttttttttaagtaatagtacttttaataaaattaagttcttaatagcacatttaatacattaaccctcccccttcttggtttctctgcattttgtgcaacatcactttgacttgattattcttgggtctgttttatttcccgcttttattttgcttttgaaatctttttccttggtggatttgtacgtgtcttcactagatgcctcaaattaagtctgaccacaatcctactctactttctacagtggagagaccatcctccctgccccagggctgtctccacccacccccccttccccacccgcaccctcgagtggggaaggggaagccctccccaccccagacgctaccatcccaaactagcggggtttctaggacaaaaagagcagggggaatctgtccctaggtggggcgagaagagtaaattgggtagagggagatgtgtttggggtctagggccagggagggggatggcagagtcattggtgtaatgaagcaggctcctcctgccaaaaggagagccaaggggcccctccaaccccttggataggaggggaaggcccagtgattgcaagctggggttggtagaaggcaagtgctttaaaaatgttgatttctcatacgcagaagccaagccctccagttttgtgtggggagggcaatgtgttcccaggccagggtacagtagatgacccctacctgaacacatatagatggaggtgaactggagcagagggtcagggttagggtcacccaaagtccctgtgcctttccccagcctctgtgcccatggggatgcctttctcccaggccttcaaggacagtgtttccacttcctccgtgggaagtccttcttggaatctaacttttatgagacaagaaagcactttgcaagtaggtgaagaacgagtcagctttaaagaacaattactgagattgttactgctactgctgccatggaggtc

SEQ ID NO: 8046 - DNA, 3046 bp, Homo sapiens
  misc_feature (550)..(578): n is a, c, g, or t
  misc_feature (2932)..(2932): n is a, c, g, or t
gtacattaaaaataatttaatagccacaatatgatgttctttaagctgcaaattgagtacactgggaatcaacaaatttgatgaagcctgtctgtctcttcaccagtggagtgagtgcagcagttagaaagagaagcaatattgtgcaactggtgcagtggtgagttaatcatagtgtataaccttgtgttcatgaaacaggttgttcattgttctgcatctctcttcatttaaaaaggatacacaattctttcctcattgcatattacaccaaacgtttgagggaaaaatcctcattcgtaaaggattttggatttataatctaaaactcaacaataaagaaataatattccaagtctctggtttcctaatatacataataactgtttataaagaaggtctaagagctgatatttgccaaagtgatagaagagttgttttttcctctctactaccaagctttaagacattaaaagaagtctagtgtatttgaatattttagagaaagctttatcattttttaagatgccaagatgctgcctacgtttgnnnnnnnnnnnnnnnnnnnnnnnnnnnnntatattttcttctggatctttgaccaaggtgatgtcagcttatttctggggaaggtgttgagctcttatacatgaaaatggatataggctattctctgggatgagtgtcatttcaatgctttataaatccatgaagctgcttgtctcataaagtagaactgatacaaattttggttggatatatagagaattttataaatgtattgccttagaatttctgggtggagacccaactacaatgacattgtcatgcaagaactataaagataattagagttaaaagttgtttaaattgtgcccttaaatacagcagaacctggagaaggtcatacttcaaaggtcgattttgagtccgaataaagaaagacctagtaacagatagtttttttttgttcattttcttctaccaagtagaggtttatgccctcagaactaaactagtaaaaatatctgaacaaaaaacctttcgttgttggcataaaaatgtgatacacttagagacattttgtttattgcatataaatctaatttttccataaattagatttatgatattttcataaagcacttgattagtttttcaaggcgtaccatcacaaagatgctttcctgcagagttctttgtatcaacagcctatggttgagatgttttctcatttcctgtagagagagaataccactaacaaacaagcaaaaactttagtgccaaaatagtggaactattttgtcatcttttgagaaaaaaatatacaaagaagtcatcttttcattaagtggattccctggttcctttccagctggttgtggaagtaatggctaacatccttcagctgactttgtctacaaggattattagcaaattctgtaggagcaagcatgtctgaccttaacttaatggatcccttattcaatcagtggcttctgtctttatgtctgttggcatatcaaaatggtttctgttcctagaaaagtaataacatatgcttatctttattctttttccaggtgattttgttttcaaatgctccttgtgaaaacacctagtgttgtagaaaggaaagtggccagaaagaacaacttgggaccatgagtaggtcattaaatagcttagtgatttatcctcatatagggcttataaaccctgtatgtgtttatatgtgcttcacagagttcgtgtcaggctgaaaggagatatgtataagaaagtggtttgtaaattatgttccatttcataaatagacactattcacaaactaaaatctaataaaaaaccacagttgtaatttaaactgcttgatataaaaagaggtatcatagcagggaaaacacactaattttcatacagtagaggtattgaaaactgaaaatgggaaggcaacttgaagtcattgtatttgattgaaaatgtttaatacatctcattattgacaaaatatgtcatcttgtatttatttcaaggaaaccaatgaattctaggtagtatattacaagttggtcaaaatattccatgtacaaatagggcttctgtgtccatagccttgtaagagatactgattgtatctgaaattattttttaaaaaaataaattatcctgctttagtgtgttaaaagtagacgatgttctaatataacactgaagtgcttcattgtatcccaacagtttaccttcaagtaatattatctttatttttaggctaagcacgtttgattattttgtctgtctcctatatagatctgttttgtctagtgctatgaatgtaacttaaaactataaacttgaagtttttattctatatgccccttaatagactgtggttcctgacgcacactgttaggtcattattttgttgtaccaaagttctagtggcttcagaaatcatagcatccaatgattttttggtgtctggctatgaatactatggttgagaattgtattcagtgattgtttctgcacacttttcaaataaaaaatgaatttttatcaattaaaaaaaaaaaaaaaaaaaaaaaaaaaaaaaatttttggggggttgggtggaaaagtttttaaaaccttggtgggggggggggcccgggggttaggtgaacactgggcccaagaactcggtgcccagaggaagaaccgcggccccaggaaccaaagtggcttcggggtttctcccccaaataaaaaaaccgccgcggggggccaccacgcgagggtttttcggaaaacacaaaattcccgaaagggcagttccgggggagcgaccccataaccggggcgctccttaatcacaaccagcggagggtcgccagagcggaaggatggcgaaatattaaaaatttaggccgcagcggccggggtggtagcncacttgaccacagtctgatctcatacatacatcacacagacaccacatccaacatccactaactaccacccagtcgctcccaccacactctctgcccataccctccacagacac

SEQ ID NO: 8047 - DNA, 679 bp, Homo sapiens
  misc_feature (171)..(185): n is a, c, g, or t
actccgtctcaaaaaaaaaaaaaaaaaaaaaaaaaaaaaatgaattgacctgtgacacctgtagcctaataaacatattaggaaaagtacttagtattgtatagatatttggattccaagagaaaatgcaacatttataataagaagtccatactctttttcttacagcannnnnnnnnnnnnnnttccattttaaaaaaggactcatttttcaggccaacaactgttgcatttgaatcagatataaataatagattttccacaaacactcagctgattgtagcagtgttatttaagctggtatgtttattttttttttcttggaaggatagctttatattttggctttcattataaattgtgttctgcttgtgtttaaatggcttacttataagctagagcactatatgggagtgttcttctctgtatggtatccttttatttgcttggctgggttcataacagtgtgtgccatattctttcttttcactgattctaagccatgagacttattagcatctggtggcaagctgcagggaccattaacagtgtgtctctttgactacaacgtggatctgccactacgcgctatgtaccattatgtacaatctctatttggctcaacttcgatgaaaaagaaataaatatttgctaaactctcaaaaaaaaaaaaaaaaaa

SEQ ID NO: 8048 - DNA, 3205 bp, Homo sapiens; identical to SEQ ID NO: 4888
  misc_feature (1259)..(1280): n is a, c, g, or t

SEQ ID NO: 8049 - DNA, 711 bp, Homo sapiens
attcggcacaggcatcgcggagggagcggaggtggttgggtttctgagtttgagtctgtcgctcctggctctcccgacacaacagcggcgcccacctgcccgcaacggactcccaggagcctcgagctcctcatttccaaagctgaactgccccgtgtctgattccgatttctcttgagcgcgtttcggagccggcccagaacagagggaagccagacacaccatacccggcccaacagtggcagggcggctgcgggtgctggtcaagctgggtcacccggcactgagtgacgatcagcaaatactcagtggacgaaatatttgcagtgcagtgaggtgaggggcataaccgcggagcgtattcgaagagatgagagagactggggattaggccaggcttgaagggaagaatggtttgagcaccgaggacaagaattaattccccaggcctgggttccagccttgtgcggctatcacgtgcttgaaacctggctagtccggagtgagatgcgctttacgtgtaaaatacaggattccaaagacgtcgtataaaataatttgtatattgtttgcatgttaggtaacatttttaatgtattggattaaataaaatgcattaaaattatttttacattccaataaaaaaaaaaaaaaaagtgactgggacaccctgcgtacccactaatcgcttgagactatcccttggcagcg

SEQ ID NO: 8050 - DNA, 2258 bp, Homo sapiens
aagagccctgacttcccttgttttccccccttgcgcccaacgtgcgtccgctcccccgccgagcgcggagtcgcctcagttgcccaggcctctatctgcatggagggccgggccgccgtgaccagatctgcgcacggggtacggacgtgcccgggcagatgggggcctacggggtgacaccgaggccgggacagcttcaggggccccagaaggacctgacccagaaattgaggtccccgctgccttctgaggagggggaggagttgctcctaggtctgaaccccgccagccttgccccgtaggaagctggagtgcgggcctcgtccacccacagaccccggggagcgcagggaaaagggtgcttcggtcgttccgatggcagtggagaccacggtccacactcacctctctgcgtctccaccgcagggctctccctacgaccacacacccggcatggcgggctccttggggtaccatccttacgcggcgcccctgggatcgtacccttacggggacccagcgtaccggaagaacgccacaagggacgccacggctaccctcaaggcctggctcaacgagcaccgcaagaacccctaccccaccaagggcgagaagatcatgctggccatcatcaccaagatgaccctcacccaggtgtccacctggttcgccaacgcgcgccggcgcctcaagaaagagaataaaatgacgtggacgccgcggaaccgcagcgaggacgaggaagaggaggagaacattgacctggagaagaacgacgaggacgagccccagaagcccgaggacaagggcgaccccgagggccccgaagcaggaggagctgagcagaaggcggcttcgggctgcgaacggcttcagggaccacccacccctgcaggcaaggagacggagggcagcctcagcgactcggattttaaggagccgccctcggagggccgcctcgacgcgctgcagggccccccccgcaccggcgggccctccccggctgggccagcggcggcgcggctggcggaggacccggcccctcactaccccgccggagcgccggcgcccggcccgcatccagccgcgggcgaggtgcctccgggtcccggcgggccctcggttatccattcgccgcctccgccgccgcctcctgcggtgctcgccaagcccaaactgtggtctttggcagagatcgccacattgtcggacaaggtcaaggacgggggcggcgggaacgagggctctccatgcccaccgtgtcccgggcccatagccgggcaagccctaggaggcagccgggcgtcgccggccccggcgccgtcacgctcgccctcggcgcagtgtccttttccaggcgggacggtgctgtcccggcctctctactacaccgcgcccttctatcccggctacacgaactatggctccttcggacaccttcatggccacccggggcccgggccaggccccacaaccggtccggggtctcatttcaatggattaaaccagaccgtgttgaaccgagcggacgctttggctaaagacccgaaaatgttgcggagccagtctcagctagacctgtgcaaagactctccctatgaattgaagaaaggtatgtccgacatttaacgcgggctgcgtcggtcccggacttttctaatttattaaaaacatggccttggcagttatttttccatcaccgagagagagagacagagagagaaaataaactacccctcctattcagaagtttatagtttatggagatggatgacataaaaatgtaaacatctccacacacacaaaaaaatgttttaaccaaccgaaaagaaaaattaaaaaaggatttgtattaaatcttattctgtatatttaatgtagcatttttgtatttaaattgataattcaatatctttgaagtaaattatgaaatcaagacacctgtacaggcatttaatgtttttttgtaatataaatatatacatttgtgtttcccccaaaactgtttcatagttaaaaaatacaagtttaatttaattttttacacctattgattctgctgggtatgagctaaagtattacggaaaggaaacaggttatactcttagatttaaaaagtgaaagaaactgcaggcgcctttgtaaaatgcaaaatatttaattaaaagagattttaacataatgagagccactcattactttttagaagcctcaataaactgtccattgccttggtcaaaaaaaaaaaaaaaaaaaaa

SEQ ID NO: 8051 - DNA, 1551 bp, Homo sapiens
  misc_feature (66)..(66): n is a, c, g, or t
ggcgaaggtatcggtatgggttttcttgtcaaagttctctacagcacaatcataattaactctggntgtgtggtggttgatggcatgcccccggggtgtccttcaaagcccccagctacctggaaatcagctccatgagaaggatcttagactctgccgagtttatcaaattcacggtcattagaccatttccaggacttgtgattaataaccagctggttgatcagagtgagtcagaaggccccgtgatacaagaatcagctgaaccaagccagttggaagttccagccacagaagaaataaaagagactgatggaagctctcagatcaagcaagaaccagaccccacgtggtagacctcttccctcctagggtaaatcagcttctgtgtcagggatgctgtgtggtgtccatctgaaccccctgcatacgcgtagttaatgtgatctccccacttttcacataagatggtgggccctgcctttcaggggaatgttggggagccaggtgggagcctttcccggatatttaagctagaagattttacagggagattctccttggatcaatatatgtctctcagtcaaagatgtaaaagcacttttgccttaaaaagaatgttctgtttctaaatagagtcaacgttgtcctcctcattggaattcactatgagtcagaatcattagactgactttttttttttccatagtaatagtattttgcagagtctcacagagctgcagatcttttgttcatcttgcagagttaacaagtctgatcctgttagtccagatttcttaaatttggccaagttataataggagcagtagcttgagacccgaagtcaggaaactttgacaatggatttttttttttttaatccagagacttgtactggaatttgccttaccctgtcagctcatggacttaaggtttcatcccgctttatgagtgcttctgaatccaagtcattgttacctgaatttgcaaattaagttgtgatattcgtgactgttaaattcctgtaattagattaacctctttgcttgcttgtttgttttctctcctattttagcttaaagtatcagtggttgagaagagcttttcggacctgttactaccccaagctgtgtaatatacttgtataacagaaataccttctatacaaacctttttttctacttttagatagaaatgtctactttttcagcagttctgtgaattaaagagcagagtgactgtgggtctggaatggctggtgtacttgggaatgtactatcaggattttacagcaatgctgggaaatgacagggaaaatgacaggaatgaatctcaccagattttttatgtactcagcagagccttgagttacggtgtttattttccaatcaagtgaagatatctcctacttctcctactggaacatctcagcttctgcagtgaagaaaaattcctgtgatagttcagttctttagtttttctatttgaaaaaaaaaaatcatttaaatgaaaaaaaaaaaaaaaaaaaaaaaaaaaaaagtcgtcctcgtg

SEQ ID NO: 8052 - DNA, 1256 bp, Homo sapiens
tttttttttttttttttaccagtttatatagggacagaacacacacagaactaagccttctggattatgttaaccaccaatattatagctcaccttcatcaaagtacagacaccagatagggaaaaggggatgggagaagggaggggaagggcaggcagaggcagcagggttatgtcattgatctaaacaaagttttctaaaccagattgtgccatcaatcaaaatggtcaaaccgatttagactttcaacatctccagtaggaagtgagcccataattatatacattactctgcaaaatgctattggatttttctttgctccatccaaactctatgtaatcaggtgcacctcaggctatagtttaaggattatgggaccaaaatcttcatatgttcaacgattctgagtacaaacagaagttggggacaaacactgtggaaaacagctgcattccttttctgcagtatatacaccaggtatttcaagacaaccattcaaaggcagttagttaacaacttagggtcattagaagggttgtgtgtgttccatcccaaatctactacccacagaggcttctcacctctggaaaccatgaagggaactgaaagctctggtttcaaaaccattctttgttctccccgacccaacgaagtatactggcagggaaagaaaataaactgccacttaatatatgccacaaagatgacatttccatgttttagaagatggcttgagctcaacagattgtccatggaaatgcagaaattaatttcttatgtctttcagtcccttctttccactgaaaatcctatggatgaaacaaaattaggtaaaaggagaaaaggtttgctcttaccccattccaccgcgtcctcctccccgcccacctctgctcatgcctccacgatcaaatccccctcttcccctgccccggttatcagggccactcatgctccggttctctcctggtccggaaaatcctccagactcctgcccataaacacccatgctactggggtggtcctgtcggaatgaacctgaggaaagagtcacatctgtaagccatggaccagcatttacaccactgcctgatgtactttctcctggaatcacaaaatcctcaattccaaggcactaaccaaggcaccatcttctttacatcacgataaagcatccttaataggtaggctcttttaagttcaacaaaactgctggatcatcacagctgaaataaccttatatagttagcctata

SEQ ID NO: 8053 - DNA, 3287 bp, Homo sapiens
  misc_feature (924)..(948): n is a, c, g, or t
atggaccaccaggacccctactccgtgcaggccacagcggccatagcggcggccatcaccttcctcattctctttaccatcttcggcaacgctctggtcatcctggctgtgttgaccagccgctcgctgcgcgcccctcagaacctgttcctggtgtcgctggccgccgccgacatcctggtggccacgctcatcatccctttctcgctggccaacgagctgctgggctactggtacttccggcgcacgtggtgcgaggtgtacctggcgctcgacgtgctcttctgcacctcgtccatcgtgcacctgtgcgccatcagcctggaccgctactgggccgtgagccgcgcgctggagtacaactccaagcgcaccccgcgccgcatcaagtgcatcatcctcactgtgtggctcatcgccgccgtcatctcgctgccgcccctcatctacaagggcgaccagggcccccagccgcgcgggcgcccccagtgcaagctcaaccaggaggcctggtacatcctggcctccagcatcggatctttctttgctccttgcctcatcatgatccttgtctacctgcgcatctacctgatcgccaaacgcagcaaccgcagaggtcccagggccaagggggggcctgggcagggtgagtccaagcagccccgacccgaccatggtggggctttggcctcagccaaactgccagccctggcctctgtggcttctgccagagaggtcaacggacactcgaagtccactggggagaaggaggagggggagacccctgaagatactgggacccgggccttgccacccagttgggctgcccttcccaactcaggccagggccagaaggagggtgtttgtggggcatctccagaggatgaagctgaagaggaggaagaggaggaggaggaggaggannnnnnnnnnnnnnnnnnnnnnnnngtgtctccggcctcagcttgcagccccccgctgcagcagccacagggctcccgggtgctggccaccctacgtggccaggtgctcctgggcaggggcgtgggtgctataggtgggcagtggtggcgtcgaagggcgcacgtgacccgggagaagcgcttcaccttcgtgctggctgtggtcattggcgtttttgtgctctgctggttccccttcttcttcagctacagcctgggcgccatctgcccgaagcactgcaaggtgccccatggcctcttccagttcttcttctggatcggctactgcaacagctcactgaaccctgttatctacaccatcttcaaccaggacttccgccgtgccttccggaggatcctgtgccgcccgtggacccagacggcctggtgagcccgcctgcgctgcccctgtggggttggtgcggtggcgccggggtcaccctgcttcttgccctgctgtgtgtggctgcctcccctgggctttctgctccctgcccagatcctgtaggcctcatcttaggaaccccttgggaggggtgggcaggggggctgctagcaagggtcccagtgaagcttccccttgccggcttagctgtgggggaccccttctccaccctctccctgagcacaggccgatggaggtggttcaaatcctctggaacatagccaagaccaggagaagagagagcactttcttcccagagccccatgctctccagaccaatgtctgggcttccctttcttgaggaccttgtgttcctggcaggtcacttgcttgtggtgttttcgtttctttttcatctcccccccacccacaaagagcacggagccagccttccacttttcccagtggggcctgctgctgagggggaggaagaaacgaagactgatcacccacgctaggcactcgcggtcccggcaggcgctgggatgggggcttatggggtggcatcgtctctgggccctcctttccccctttgcctgtttcggatctgtggttcctttgaaagccagaacaatggatcggcttccttacccagcacccctccggtaggtgggtggccacgtggatgcctcgctggggaggtcttggaggcctggtctctgcctcgacgggagatccccgatcactggcattcaccccctgcaaaaatcggggcgacaatagctcactgcctacttgctgcagggagatgaaaggctttgcagaaagctttgagctctgtgggggaacacactagagaaccaaaaatgtgattatatggtgatataaaaatccctttcctctgtgtttaccaccacctgtcttcctgtagacttttgttctgtccctggggtgtgtgaattcctaccccgaactggaagccgggagtggcagacagaatcactatttcaagttaaaggatctctttgagaatgtgttcttctggctgcaaaggtctgagttattacgctacatgacaacgtttcgacatttcaccggcaacaccaagagggtttttagtggcttgggtctccccagtgggggataagtcttttgtcatcaaggaggcaaattgtctccccaagacagctcaaaatatccacacctcggcaacagtctaagatgagagcctgtgacaggtggcagcgcccccaggtggggtactggcatcagagcctggtgcgcccctaggggagcctcccactggagtgcccggccaggtctccaagccccaaatgagtccttgtgaaccacaactgatccccccaggtgggtgcttgtggactgcctcggacccagccacgctgctccccgcaatgctgatggggctgtgcattgaggacccctgcttcctggttctcagtcccaccccaaaacctggcacccagaacagttggaagtgtggaaaggaggtttatcggccttcccttggagagggcctggcttcaacattgggccagtaggcatcttagcttggcaggtgtcgggggaatgggccagatggacctgctagatttggaagggcaccgagggagttttctgggtgtagagagaatggaggggaccaaaaagagtccttcctggggtgtgggaggcttcccagcttggtcctcagtgggttgttgaggccagagtatcgccctgggatgtggtggggagctgggccaggagagggactgactgtgaccctctgctggccggtcttgtgtgcgccccatgggacccccagtgttcttgcctgtgacctcttattgcgacatgcaggtggtgtttttttttttttttaaactctgagctattttatcaataaaggatattttgtaataagaaaaaaaaaaaaa

SEQ ID NO: 8054 - DNA, 1737 bp, Homo sapiens
  misc_feature (1268)..(1268): n is a, c, g, or t
gaaaaaaaaaaaaaaaaaactttgaatatatcaagaaagggctattccagaggcttctcctcaggagaaactatgcactaggttcccaccaaatacaatgtgacctttttttcccctttctctgtacacaccccagatatgtgccaagcaaatgagaatgagggccgttgacaattaaagcataaagaagctagtcaccagattgagatggacatgctgctaactgctgacagcttgacctgagcagtcctaacttgtatctggtctgttagcattgggttagattgactaacagagtaaataaaattcacctgtcataagacacgctacatctgctatcatcaagaaacaaatcatccagaagaaactttttttcatcctgtggtcacacccttttcttaagagcttcttttttaaaattatgacaaacgaatttcattctttaaaatcacttatcttctcccaaacttgaagtatttaaattaggtggttttgcttttccctctcattgtttattttttggggatggatctaaatgagtaagatgagcaataaaagataccagaaagactggagggatcacagtgttttcatcagaactaagtagagggtcggttcctgccctggttttggggtagctagaaaaggaaatcatgaatgcactggaaatgttggctcgagagaaaagactggcatagctctgcctcgcagtgggtgagagcgtattgatcgtagggacctgcagagttcctatgaccaggtgagtcggctctgaggaaggggttaggaaagcaagtacagctgcatgaaatagctgaagttcctttggggtcaggaagagccgacaattgtggggttttggttgcttttgctttgtttttgagtgggaagtgttgctggaatcccctgagaaccgaaagatgccaggggtcagcaaggctatagaaaaggccagtggtaacacctcgttttcatcctaacagaggagtaggtgcgaatggcaccagcatggatcgttcctttcttgatcattactcatgcttgccactgtagcaacacaacaaagccatgattgtaattaatactaggctaaagaccttgatcaaaatgggagctcatttactgttctatgaggtatgtaagtaacttctcttcacattttccctcagagataaaccacacgtggtagtcttgtttgcgttagtactaaggtcatgtttgatctgtcccagacgagtcgcatatgtcctgtagctggagtgtttgcncaccataaatggtcattttcaaaaagtattgtgtaaatccagctgtacaactgaccagtgagttatctgtcatcactgttgcccacatacccgtccttccttgtgtagtttcatcatcctcatccttcccacatcttgcgcaaaatgattttctgtgctcattcggcaataactatgttattcggcatactgtctttttggcatttgttgaaaaatccaaatgcttttaatccaaaagattaatccaaatcttttttaatccaaatgattttaatccaaatccaaataacaggaggttaaaaaaaaaaaaaaactaagcatttttacatgtacactgaattggatcagcattattgttcattataatgctatacatatttttggagcaacatactatagttgtcataaaactatctttattcttctcctctaaagtgctgttgtaaattcatttgacctttactgcagg

SEQ ID NO: 8055 - DNA, 2696 bp, Homo sapiens
  misc_feature (652)..(682): n is a, c, g, or t
  misc_feature (2600)..(2600): n is a, c, g, or t
acaccggtcaggcccggcgcgggctgcgctctccagctgtggctatggccccagccccgagatgaggagggagagaactaggggcccgcaggcctgggaatttccgtcccccaccaagtccggatgctcactccaaagtctcagcagggacctgagggagctcagggagggagagaagccagaagaccaggcagagactgaagagagctggcaaggcctggctagaaaaactccaggcaaggcctgtgcccctgagggagggagctgtcagccagggaaaaccgagaacaccatcaccatgacaaccagtcaccagcctcaggacagatacaaagctgtctggcttatcttcttcatgctgggtctgggaacgctgctcccgtggaattttttcatgacggccactcagtatttcacaaaccgcctggacatgtcccagaatgtgtccttggtcactgctgaactgagcaaggacgcccaggcgtcagccgcccctgcagcacccttgcctgagcggaactctctcagtgccatcttcaacaatgtcatgaccctatgtgccatgctgcccctgctgttattcacctacctcaactccttcctgcatcagaggatcccccagtccgtacggatcctgggcagcctggtggcnnnnnnnnnnnnnnnnnnnnnnnnnnnnnnncctggtgaaggtgcagctggatgctctgcccttctttgtcatcaccatgatcaagatcgtgctcattaattcatttggtgccatcctgcagggcagcctgtttggtctggctggccttctgcctgccagctacacggcccccatcatgagtggccagggcctagcaggcttctttgcctccgtggccatgatctgcgctattgccagtggctcggagctatcagaaagtgccttcggctactttatcacagcctgtgctgttatcattttgaccatcatctgttacctgggcctgccccgcctggaattctaccgctactaccagcagctcaagcttgaaggacccggggagcaggagaccaagttggacctcattagcaaaggagaggagccaagagcaggcaaagaggaatctggagtttcagtctccaactctcagcccaccaatgaaagccactctatcaaagccatcctgaaaaatatctcagtcctggctttctctgtctgcttcatcttcactatcaccattgggatgtttccagccgtgactgttgaggtcaagtccagcatcgcaggcagcagcacctgggaacgttacttcattcctgtgtcctgtttcttgactttcaatatctttgactggttgggccggagcctcacagctgtattcatgtggcctgggaaggacagccgctggctgccaagcctggtgctggcccggctggtgtttgtgccactgctgctgctgtgcaacattaagccccgccgctacctgactgtggtcttcgagcacgatgcctggttcatcttcttcatggctgcctttgccttctccaacggctacctcgccagcctctgcatgtgcttcgggcccaagaaagtgaagccagctgaggcagagaccgcaggagccatcatggccttcttcctgtgtctgggtctggcactgggggctgttttctccttcctgttccgggcaattgtgtgacaaaggatggacagaaggactgcctgcctccctccctgtctgcctcctgccccttccttctgccaggggtgatcctgagtggtctggcggttttttcttctaactgacttctgctttccacggcgtgtgctgggcccggatctccaggccctggggagggagcctctggacggacagtggggacattgtgggtttggggctcagagtcgagggacggggtgtagcctcggcatttgcttgagtttctccactcttggctctgactgatccctgcttgtgcaggccagtggaggctcttgggcttggagaacacgtgtgtctctgtgtatgtgtctgtgtgtctgcgtccgtgtctgtcagactgtctgcctgtcctggggtggctaggagctgggtctgaccgttgtatggtttgacctgatatactccattctcccctgcgcctcctcctctgtgttctctccatgtccccctcccaactccccatgcccagttcttacccatcatgcaccctgtacagttgccacgttactgccttttttaaaaatatatttgacagaaaccaggtgccttcagaggctctctgatttaaataaacctttcttgtttttttctccatggcaaaaaaaaaacaccagccgtggcttcatgccctggagtgggtagagggctggcagcctgagtctgggagatgagcatgacccagctgggccctggccaggactggacctgggtccaagggggaggaggggggagtagtcctcttggcctcagaggggctgcaatgccccctgctggggccacaggggagggacaggcctggaaccagaacaccaagactgttagccaagactaagaacgggtttttctttgctgcttcattctttctttcataggacagaggatggagatagctccccatctttcctntgtcttcactgccagcccctccactctgtccccagccccagcaatgaactctgcaaaactggccaggtcctggcatactccccataccacaggcag

SEQ ID NO: 8056 - DNA, 2075 bp, Homo sapiens
gcacgagggcccactctgccctggccgcgctgtgtggtgaccgcaggccccagacatgagggcggcccgtgctctgctgcccctgctgctgcaggcctgctggacagccgcgcaggatgagccggagaccccgagggccgtggcccttccaggactgccccgtggacctgttctttgtgctggacacctatgagagcgtggccctgaggctgaagccctacggggccctcgtggacaaagtcaagtccttcaccaagcgcttcatcgacaacctgagggacaggtactaccgctgtgaccgaaacctggtgtggaacgcaggcgcgctgcactacagtgacgaggtggagatcatccaaggcctcacgcgcatgcctggcggccgcgacgcactcaaaagcagcgtggacgcggtcaagtactttgggaagggcacctacaccgactgcgctatcaagaaggggctggagcagctcctcgtggggggctcccacctgaaggagaataagtacctgattgtggtgaccgacgggcaccccctggagggctacaaggaaccctgtggggggctggaggatgctgtgaacgaggccaagcacctgggcgtcaaagtcttctcggtggccatcacacccgaccacctggagccgcgtctgagcatcatcgccacggaccacacgtaccggcgcaacttcacggcggctgactggggccagagccgcgacgcagaggaggccatcagccagaccatcgacaccatcgtggacatgatcaaaaataacgtggagcaagtgtgctgctccttcgaatgccagcctgcaagaggacctccgggcctccggggcgaccccggctttgagggagaacgaggcaagccggggctcccaggagagaagggagaagccggagatcctggaagacccggggacctcggaccttttggtaggccaacggatgaagggagaaaaagggagccgtggggagaagggctccaggggaccaaagggctacaagggagagaagggcaagcgtggcatcgacggggtggacggcgtgaagggggagatggggtacccaggcctgccaggctgcaagggctcgccgggttttgacggcattcaaggaccccctggccccaagggagaccccggcgcctttggactgaaaggagaaaagggcgagcctggagctgacggggaggccgggagaccaggagctcggggaccatctggagacgaggggccagccggagagcctgggccccccggagagaaaggagaggcgggcgacgaggggaacccaggacctgacggtgcccccggggagcggggtggccctggagagagaggaccacgggggaccccaggcacgcggggaccaagaggagaccctggtgaagctggcccgcagggtgatcagggaagagaagggcccgttggtgtccctggagacccgggcgaggctggccctatcggacctaaaggctaccgaggcgatgagggtcccccagggtccgagggtgccagaggagccccaggacctgccggaccccctggagacccggggctgatgggagaaaggggagaagacggccccgctggaaatggcaccgagggcttccccggcttccccgggtatcccgggaacaggggcgctcccgggataaacggcacgaagggctaccccggcctcaagggggacgagggagaagccggggaccccggagacgataacaacgacattgcaccccgaggagtcaaaggagcaaaggggtaccggggtcccgagggcccccagggacccccaggacaccaaggaccgcctgggccggaccgaatcgcgagatttttgacatcattccttaaacaagggccccctggctgtcgccgccccaagtcccgcccccatcccgccttttccatcccccgtctggcccccgcccaagaacaagacgcgcgccggtggccggcgcgtcccagtaacatgccttcgcagggcggcccaaaccgcgcgcgataggggttcttccacgccgagtggcgctatcattgctggtgtgtcgtcgatggtgtctc

SEQ ID NO: 8057 - DNA, 1259 bp, Homo sapiens
ggctctggactggggacacagggatagctgagccccagctgggggtggaagctgagccagggacagtcacggaggaacaagatcaagatgcgctgtaactgagaagcccccaaggcggaggctgagaatcagagacatttcagcagacatctacaaatctgaaagacaaaacatggttcaagcatccgggcacaggcggtccacccgtggctccaaaatggtctcctggtccgtgatagcaaagatccaggaaatactgcagaggaagatggtgcgagagttcctggccgagttcatgagcacatatgtcatgatggtattcggccttggttccgtggcccatatggttctaaataaaaaatatgggagctaccttggtgtcaacttgggttttggcttcggagtcaccatgggagtgcacgtggcaggccgcatctctggagcccacatgaacgcagctgtgacctttgctaactgtgcgctgggccgcgtgccctggaggaagtttccggtctatgtgctggggcagttcctgggctccttcctggcggctgccaccatctacagtctcttctacacggccattctccacttttcgggtggacagctgatggtgaccggtcccgtcgctacagctggcatttttgccacctaccttcctgatcacatgacattgtggcggggcttcctgaatgaggcgtggctgaccgggatgctccagctgtgtctcttcgccatcacggaccaggagaacaacccagcactgccaggaacagaggcgctggtgataggcatcctcgtggtcatcatcggggtgtcccttggcatgaacacaggatatgccatcaacccgtcccgggacctgcccccccgcatcttcaccttcattgctggttggggcaaacaggtcttcagcaatggggagaactggtggtgggtgccagtggtggcaccacttctgggtgcctatctaggtggcatcatctacctggtcttcattggctccaccatcccacgggagcccctgaaattggaggattctgtggcgtatgaagaccacgggataaccgtattgcccaagatgggatctcatgaacccacgatctctcccctcacccccgtctctgtgagccctgccaacagatcttcagtccaccctgccccacccttacatgaatccatggccctagagcacttctaagcagagattatttgtgatcccatccattccccaataaagcaaggcttgtccgacaaaa

SEQ ID NO: 8058 - DNA, 3410 bp, Homo sapiens
agtctgctgcaccttctgtgctgtgcgtggtccatgccccaaggctggaggtgcaaaggggacaggtcccggaggctctggaagggcagagaagccaggcgtggaagggtagggagagccctcggggcctctggcctctcccacagagagagcatgaaggaaggcctgggcgtgagaacagatgtgggggacacagaggcggaggccacgtggcaggaggggaaacaggctggtggaacagggtgtacggggcctggggagggatttggatctcattctttgtggggtgtggggagtgatcctggctactctgggcaccacagaggcaggagccagtacaggccatcacgtgagggcaggcagcccagtcaccgtcctcttgctccaggccatcatgtgagagcaggtggcccagtcaccgtcctcctgctccaggccatcacgtgagggcaggtggcccagtcaccgtcctcctgctccaggccctgcagccggcagcacccctccgcagcccaccacacgcagcaccaggaggctgtgaatctccccactctgtaggaacagctgccgcttcctgggtccccattccccaacggaacgtgttccatgacatctgtgcagcatccgctgtgtgccaggcacagttctaggccccggagacaaagcgggaacagcacagacaggaacctccactcttacagtgaggagagaaagaggagtgaggcttggggaggttgggcaggacagctgcagggagagggagggcagaggacgggcgagtcggggagtaccaaggaaggcctcagcaaagcagcatggaaataagacctgaaagcacggaagggccctccgggaggcgggtatgcaggcgcagaggccctggggccgagagctgtgtgtggagaccagcgtgaggggctggggcagctgggcccaaagacagattcacagacgccttccatggccgctgcggtagtcatgccctgcggcgtagcctcctcccaaggctggagcccttccccggagctggtcgtggccaggagctcccaccggggcagggcgctaaggcccggcactccgcctggctgctgtggggctgctgccggggcgggtgctgacgctgtctgtgcccctgcccgtctcccaccaggttccaggtaaatacacggtcgtggcggaccacgagaagggaggccccgatgcgctgcgcgtgaggagcggggacgtggtggagctggtgcaggagggcgacgagggcctctggtaagaccccgcgctcagccccggactgccccgcacgtggctgccgctgaccctcgccccttgcaggtacgtcagggacccgaccactggcaaggagggctgggtgccggccagcagcctgtccgtccggctcggcccgtccggctcggcccagtgcctgagcagctcagagtcgagcccggggtcggccgtgctgagcaactcgtccagctgcagcgagggcggccaggcccccttctccgacctgcaggggtagcgcggcctcggcgccggagacccgcgcgctgtctggggctgcggtggcgtggggagggcgcggcccccggacgccccgaggaaggggcacctcaccgccccgacccagagcgcctggccgtgcgggctgcagaggacccctccggggcagaggcaggttccacggaaaaccccggcccgctggggcttccccggagactccagagcccacagaggaggggccgcagggaacagccccgggcggcaggcgccgggcagcggcatctcgtcctggctccaccgtgctgcttctgcctccggacggtgctttcaggggacgcgcggaccgtggtggagctgcttccggagaagtggaggatcctctggccaacggcctgaggagagcggggcacggggtctctttagcttttacaagttttaggattttttcaagcagggatcaatcccgtggccattttttgtggtactttggcctcaattcttcaccaggaatcactgtgtttacatgaaatgacaatttgatactgtatttgatagaaaactatttttttgttaccggggtttacatagaagcacgttgtttataccactaagtgactttggcggggctctcccatgtccagggatggtgctccctgaagctccctggtcacaggtggatgaaaacgtgtccgtgggtgacatcaggtggtgtctccaccaccaaaagcagttagaagccaaggagattcctttatctacctagggttcattttcaaaagaaaatttaaactataatttaaacaattaacgttcttttctacaaaaaaaatgcagggacttgatttttttaaagagcttcactgaattaggatatttttattgcttttaaagaaaatacaaagttgcagtttctgcagggtgtggcgtggaccagtgctgccgaccatagctcagagagccctgcccctgcctcactgcactgcagcctcctcggaggccgcacctccactccactccccacgcgccccctgcctcccacccaggtccacctgccacctggtgaccaccttgagtacagaagtgaaagtggggagagtattttattcaagtcacagcagaactggaaaaaaactcttctgttttaccaacttcttgtgtttcagaaacatattctgttcaaaacttttgaagccctttcggtgtctagtctgcagatgtttttgtatgtgtgcacctctgaccatgtgtgtacatatgtgtcttgctggaaaggacatattcgctgtccccgtgctgctgggagggccgcctcacagcctcacggttcccagccccagcacagtggaggcaggcgtggctgcattcccctcacgctaccctcccagcggcttgtagccgtcactggccagacctccagggtgcggaatcaaataggaagcatgcagagactcggcagcttttcctctgatgtgtaagttatttggaacgcgtgctgtgtcccgcgatgtccctgatgtactgtgcaggcgcggtgcctccgtctcgtcgcacagctgcgcgcccttgtgtgaccctccccataaaggcactttacagcttcatgtttcatccactgtcacttttttttaactgctgatgtaaatggaattttaaaagcagagttctttattgtatgggtgacgtttgaataaatatcagcaactcctgcaaaaaaaaaaaaaatggtcaagaccacagaacgtctcaagcggtcggggttcccaggcccgcagtgcactgtgcttgcccatggtaacgtcatgttgggacggaaaagaagccggcagtgggaaggcgcaacgtgcggctccaggcacggaacaacggatttgcttcttctgtcgaggggacgttcaccacttccccccggg

SEQ ID NO: 8059 - DNA, 1778 bp, Homo sapiens
ggcgctgtcgtggattgaaccacgaagggacgataccagaaaacaccctcaacccaaaggaaatagactacagccccaatggctgacttggctatagaaaaaagaaaggaacgaaaagagacagttttttttggaaagctaagtcttccctttatcgagtcaaggagccagaggccatgcagtggctcagggtccgtgagtcgcctggggaggccacaggacacagggtcaccatggggacagccgccctgggtcccgtctgggcagcgctcctgctctttctcctgatgtgtgagatccctatggtggagctcacctttgacagagctgtggccagcggctgccaacggtgctgtgactctgaggaccccctggatcctgcccatgtatcctcagcctcttcctccggccgcccccacgccctgcctgagatcagaccctacattaatatcaccatcctgaagggtgacaaaggggacccaggcccaatgggcctgccagggtacatgggcagggagggtccccaaggggagcctggccctcagggcagcaagggtgacaagggggagatgggcagccccggcgccccgtgccagaagcgcttcttcgccttctcagtgggccgcaagacggccctgcacagcggcgaggacttccagacgctgctcttcgaaagggtctttgtgaaccttgatgggtgctttgacatggcgaccggccagtttgctgctcccctgcgtggcatctacttcttcagcctcaatgtgcacagctggaattacaaggagacgtacgtgcacattatgcataaccagaaagaggctgtcatcctgtacgcgcagcccagcgagcgcagcatcatgcagagccagagtgtgatgctggacctggcctacggggaccgcgtctgggtgcggctcttcaagcgccagcgcgagaacgccatctacagcaacgacttcgacacctacatcaccttcagcggccacctcatcaaggccgaggacgactgagggcctctgggccaccctcccggctggagagctcagctgatacggcatcctgcgagaagacctgccctcctcactgggatccccttcctgcctcctcccagggctctgcagggccttgctcagtcccttccaccaaagtcatctgaacttccgtttccccagggcctccagctgccctcagacactgatgtctgtccccaggtgctctctgcccctcatgcccctctcaccggcccagtgccccgactctccaggctttatcaaggtgctaaggcccgggtgggcagctcctcgtctcagagccctcctccggcctggtgctgcctttacaaacacctgcaggagaagggccacggaagccccaggctttagagccctcagcaggtctggggagctagagcaaaggagggacctcaggccttccgtttcttcttccagggtggggtggcctggtgttcccctagccttccaaacccaggtggcctgcccttctccccagagggaggcggcctccgcccattggtgctcatgcagactctggggctgaggtgccccggggggtgatctctggtgctcacagccgagggagccgtggctccatggccagatgacggaaacagggtctgaccaagtgccaggaagacctgtgctataaaccaccctgcctgatcctgcccctgcctgaccccgccacgccctgccgtccagcatgattaaagaatgctgtctcctcatggaaaaaaaaaaaaaaaaaaaaaaaaaaaa

SEQ ID NO: 8060 - DNA, 3059 bp, Homo sapiens
aaaatgagacccccatctccaaaacacacagacccccaacgcaggcctgctgccggggaggtgctggagggagggcgggggcactgggcgcagagctgctgagcagggtttcctggccacctgcgctcccttgaacgcagtgcaaaggggaggatctttgctctgtgacgagttcttccctttccggcctttgatccgtgctgctccctgcctttgggggaagaggaggcctcacaccacatccccaggtggccgtgtggcctcgactccactgacccaggatcaggagaggctgagctcctttctcagcagcttcttcctatggccccagcctccgtgccctcttccctccaggggggactcggtgcctgcctggggaggaaggagaggcgttgcaggtcagcatggggtggctgcagccggcgttggcctcaggcacaggctccacagggcctgttcccaccagcccggcccggcagggccgcatggtggcgcgtgagggaggaccctggagggggaccttcctgcaagaattggtgggggccgcggtctccgccttctagaggtggcggcctactgcccttcgggtgttgtgtgcaaagccccgtttcctgctccctgcgcttgtatcctgctgccttccctcctgctggtgaagctcgtgctgccctttgctggcctgtgctgccactgccgacccgtgtcccgtggtggagctgtcgtggggctcacgtgacttcccttcctacaggcgtccgagctgggccacagcctgaacgagaacgtcctcaagcctgcgcaggagaaggtgaaggagggaaagatttttgatgatgtctccagtggggtctctcagttggcgtccaaggtccagggagtcggtagtaagggatggcgggacgtcaccacctttttttcggggaaagcagagggccccttggacagcccctcggagggccacagttatcagaacagcggtctggaccacttccaaaacagcaacatagaccagagcttctgggagacctttggaagtgctgagcccaccaagacccgcaagtccccgagcagcgacagctggacgtgcgcggacacctccaccgagaggaggagctcggacagctgggaggtgtggggctcggcctccaccaacaggaacagcaacagcgacggcggggagggcggggagggcaccaagaaggcagtgccgccggccgtgcccactgatgatggctgggacaaccagaactggtagggcccactgcgcccccgtccccagcgcccccgggcgacttcgtgtttgcactctgccctcgtcgttcctcctccttccatttgacccaagaatcagcaactgcagtgtgaggacagcgtctcgggaggcaggaccctagggagacccgggtgtgcgccgcctgcgcgtggggagtcttcggtgcgtgggggcggcttgctgtccagcctgtgtgggggccgtcccgtcccacactcccctgggcattcttggactcaaggccggggctctgcgtggcttgctgggaggtgggctgcagcacagaggcctgtgactgcgttccagcggccagttcactacgcagtatctctggggcctgggaccagccacgtgccgagctgtcagcgacgtgaggtgtcccttctcgttgagatatttaactttggttttgctctagttctttctttttgaagagagtgactggagtggtaaagatggaaatgctggaaatgatactggcgctcacgctgccatccgaccaccctcggctcccgagtccacgcctgcctgggcctgtgctgtcagacccgcgtcggtcgtaaccctctgtggctcccctgcatcagcaccgtcccaccaccaagttcaccaggttcaccagacacggcctccacaatagccacacccacacctgagctgttctcagtgctggaacttgaccatcctggaacaccctggaagaaaaaggagcgcagggtgggccctcggccctgatgcaggagggtgcgatagcggacgtggccaggcaggaggggccgggttcaggagctgagcaggggatgcctgtgcgtggtgcctgggtctagggaagctccagccccaggatggggctgccctgcacaccggtgcccgccacatgccaaccctcacctccccgaggactggatgatgtgctgccacgtgtgactcgtctcccttgtctgccctgtgtgaccctcagtcttggccagccatgcatgcgcccgaagctcgtgcagtttgtacgtgaggtgctctcctccctgccaccatgctcatcactctggccttggccatgctccctggtcaccccacttcccggtcgccgtctgcagcactcctggagcagcctgggcccttcagcccctgtgctcgtcccaccctagggactcagccacttgcagaacaggatgggaccgagatttcagcgagccctcctggcgcccggtcctccctgtgggcaccagccctcttggtagctggtgtggagggccggtgtccttggctgccacggagggatttgatcaccgaagcagccacctgctgtagttggacctgaggtcagaggcggggcatcagaggctcaaggtgctgagaagccaccgggaaagcagccagcacaaagggcccaggaagccagcccccgagagctgagcgtgggggtctttgagtgtctttctccaagctgagacgtgggcggccgctgtggtatcctccccagggctgcttggaaccctggtggggctgaaatggctcccaagaagggtggaactccacctttgaacaaggggatgtggtggtccacaatgggcctggtttcccccccacaacctgtactttggcacccatggaaccaagggcctgtccccccccccaaggaggggggctttcccctggggggataaggggggaacgaccacatctttcccccattatccatcggtgtgcatcagaggcgccgtgccaccactcccaaccaggtcgtgtggggctgaccatatcagcccgcgtcgccctcttacactca

SEQ ID NO: 8061 - DNA, 755 bp, Homo sapiens
ggcacgagaaaatttatttggcaggcagtgtggaggacagattaggagcatataaacccagaggtgtgccccaggagggtttttgcaaaggtcaaaatgagatagaatgagggcctgaaataattcagtaatttggagatggagaagaggaaagacttctctgctcttgcactgccatcagcctggtctgggccatggtcatctctgacccggaagactgaccccacctcttggctcaccctctgcctcccaacctcctcttcacaaagaagccagagggatacttttaacacacaacccagatcacatgacttcgtaacttaaacctcttcactggcttcccaaagacttaaaatgaattctgatgcctttattttattgctttacatgaacagggccctgcgaacctctccagtgtcattccactccatcctcctttcagtgcacgatgctccagccacactggccatctttcggttcctgatacaaaaaaaaacacgttccttttccatggaaagcaggtcacccttgttattttgtatcgatgacaactctttaaacttattttgctttttggctttatgtatgtgtgtgggtgggtgggactgactgccccactagaatgtaagctccatgagggcagggaatcttgctttcttgtttaccattgtatactcagttctttacacagtgcctgaaacataacaggtacacaataaatatctattgaatgaaagcaaaaaaaaaaaaaaaaa

SEQ ID NO: 8062 - DNA, 3905 bp, Homo sapiens
  misc_feature (186)..(212): n is a, c, g, or t
  misc_feature (2886)..(2940): n is a, c, g, or t
cagtttgcaaaagccagaggtgcaagaagcagcgactgcagcagcagcagcagcagcggcggtggcagcagcagcagcagcggcggcagcagcagcagcagcggaggcaccggtggcagcagcagcatcaccagcaacaacaacaaaaaaaaatcctcatcaaatcctcacctaagctttcagttnnnnnnnnnnnnnnnnnnnnnnnnnnngccaggagagggaaagaggaaaggggggcaggaaaaaaaaaaaacccaacaacttagcggaaacttctcagagaatgctccaaaactcagcagtgcttctggtgctggtgatcagtgcttctgcaacccatgaggcggagcagaatgactctgtgagccccaggaaatcccgagtggcggctcaaaactcagctgaagtggttcgttgcctcaacagtgctctacaggtcggctgcggggcttttgcatgcctggaaaactccacctgtgacacagatgggatgtatgacatctgtaaatccttcttgtacagcgctgctaaatttgacactcagggaaaagcattcgtcaaagagagcttaaaatgcatcgccaacggggtcacctccaaggtcttcctcgccattcggaggtgctccactttccaaaggatgattgctgaggtgcaggaagagtgctacagcaagctgaatgtgtgcagcatcgccaagcggaaccctgaagccatcactgaggtcgtccagctgcccaatcacttctccaacagatactataacagacttgtccgaagcctgctggaatgtgatgaagacacagtcagcacaatcagagacagcctgatggagaaaattgggcctaacatggccagcctcttccacatcctgcagacagaccactgtgcccaaacacacccacgagctgacttcaacaggagacgcaccaatgagccgcagaagctgaaagtcctcctcaggaacctccgaggtgaggaggactctccctcccacatcaaacgcacatcccatgagagtgcataaccagggagaggttattcacaacctcaccaaactagtatcattttaggggtgttgacacaccaattttgagtgtactgtgcctggtttgatttttttaaagtagttcctattttctatcccccttaaagaaaattgcatgaaactaggcttctgtaatcaatatcccaacattctgcaatggcagcattcccaccaacaaaatccatgtgatcattctgcctctcctcaggagaaagtaccctcttttaccaacttcctctgccatgtcttttcccctgctcccctgagaccacccccaaacacaaaacattcatgtaactctccagccattgtaatttgaagatgtggatccctttagaacggttgccccagtagagttagctgataaggaaactttatttaaatgcatgtcttaaatgctcataaagatgttaaatggaattcgtgttatgaatctgtgctggccatggacgaatatgaatgtcacatttgaattcttgatctctaatgagctagtgtcttatggtcttgatcctccaatgtctaattttctttccgacacatttaccaaattgcttgagcctggctgtccaaccagactttgagcctgcatcttcttgcatctaatgaaaaacaaaaagctaacatctttacgtactgtaactgctcagagctttaaaagtatctttaacaattgtcttaaaaccagagaatcttaaggtctaactgtggaatataaatagctgaaaactaatgtactgtacataaattccagaggactctgcttaaacaaagcagtatataataactttattgcatatagatttagttttgtaacttagctttatttttcttttcctgggaatggaataactatctcacttccagatatccacataaatgctccttgtggccttttttataactaagggggtagaagtagttttaattcaacatcaaaacttaagatgggcctgtatgagacaggaaaaaccaacaggtttatctgaaggaccccaggtaagatgttaatctcccagcccacctcaacccagaggctactcttgacttagacctatactgaaagatctctgtcacatccaactggaaattccaggaaccaaaaagagcatccctatgggcttggaccacttacagtgtgataaggcctactatacattaggaagtggcagttctttactcgtcccctttcatcggtgcctggtactctggcaaatgatgatggggtgggagactttccattaaatcaatcaggaatgagtcaatcagcctttaggtctttagtccgggggacttggggctgagagagtataaataaccctgggctgtccagccttaatagacttctcttacattttcgtcctgtagcacgctgcctgccaaagtagtcctggcagctggaccatctctgtaggatcgtaaaaaaatagaaaaaaagaaaaaaaaaagaaagaaagagggaaaaagagctggtggtttgatcatttctgccatgatgtttacaagatggcgaccaccaaagtcaaacgactaacctatctatgaacaacagtagtttctcagggtcactgtccttgaacccaacagtcccttatgagcgtcactgcccaccaaaggtcaatgtcaagagaggaagagagggaggaggggtaggactgcaggggccactccaaactcgcttaggtagaaactattggtgctcgactctcactaggctaaactcaagatttgaccaaatcgagtgatagggatcctggtgggaggagagagggcacatctccagaaaaatgaaaagcaatacaactttaccataaagcctttaaaaccagtaacgnnnnnnnnnnnnnnnnnnnnnnnnnnnnnnnnnnnnnnnnnnnnnnnnnnnnnnncaaacattgctgcctttgtccccacacagcctctaagcgtgctgacatcagattgttaagggcatttttatactcagaactgtcccatccccaggtccccaaacttatggacactgccttagcctcttggaaatcaggtagaccatattctaagttagactcttcccctccctcccacacttcccacccccaggcaaggctgacttctctgaatcagaaaagctattaaagtttgtgtgttgtgtccattttgcaaacccaactaagccaggaccccaatgcgacaagtagttcatgagtattcctagcaaatttctctctttcttcagttcagtagatttccttttttcttttcttttttttttttttttttttttggctgtgacctcttcaaaccgtggtacccccccttttctccccacgatgatatctatatatgtatctacaatacatatatctacacatacagaaagaagcagttctcacaatgttgctagttttttgcttctctttcccccaccctactccctccaattcccccttaaacttccaaagcttcgtcttgtgtttgctgcagagtgattcgggggctgacctagaccagtttgcatgattcttctcttgtgatttggttgcactttagacatttttgtgccattatatttgcattatgtatttataatttaaatgatatttaggtttttggctgagtactggaataaacagtgagcatatctggtatatgtcattatttattgttaaattacatttttaagctccatgtgcatataaaggttatgaaacatatcatggtaatgacagatgcaagttattttatttgcttattttttataattaaagatgccatagcataatatgaagcctttggtgaattccttctaagataaaaataataataaagtgttacgttttattggtttcaaaaaaaaaaaaaaaaaaaaaaa

SEQ ID NO: 8063 - DNA, 554 bp, Homo sapiens
  misc_feature (524)..(530): n is a, c, g, or t
tttttaaataaagtgtattgtgtatattaaggtacacaatatgacgttatgggatacatatagatagtaaaatagttactatgaaaaagcaaattaacatatccattatctcacataattacccattttgctgtttttgggacaagagcggctaaaatttactcattgagcaggaatcccaacatggtgcaattttattacctctagtcctcattttggataagcctacatgtgcaggtgaagagagacagggatacagagcatccacagggctcactctgtgccaggcccatatcaacccttcaacaggctgaggatctacagcacctcacggggtaggcgtaagcagtgctattttgcagttgagaaagccacctttagagaaatgaagtaacctccaaaggatgctcggctaagaagtgaggagccaggagagtctaatgccaaggattgtcttcctcctacttcaccaccctgccctattcactcttcacccattccagtaatcacctctggagttttcnnnnnnntatggtacttctacttactaatga

SEQ ID NO: 8064 - DNA, 3787 bp, Homo sapiens
gaaccggcacgaggccccgggctgccggcgcgggcgccgcggcacgtccacaggctgggtcgcgaggtggcgatcgctgagaggcaggagggccgaggcgggcctgggaggcggcccggaggtggggcgccgctggggccggcccgcacgggcttcatctgagggcgcacggcccgcgaccgagcgtgcggactggcctcccaagcgtggggcgacaagctgccggagctgcaatgggccgcggctggggattcttgtttggcctcctgggcgccgtgtggctgctcagctcgggccacggagaggagcagcccccggagacagcggcacagaggtgcttctgccaggttagtggttacttggatgattgtacctgtgatgttgaaaccattgatagatttaataactacaggcttttcccaagactacaaaaacttcttgaaagtgactactttaggtattacaaggtaaacctgaagaggccgtgtcctttctggaatgacatcagccagtgtggaagaagggactgtgctgtcaaaccatgtcaatctgatgaagttcctgatggaattaaatctgcgagctacaagtattctgaagaagccaataatctcattgaagaatgtgaacaagctgaacgacttggagcagtggatgaatctctgagtgaggaaacacagaaggctgttcttcagtggaccaagcatgatgattcttcagataacttctgtgaagctgatgacattcagtcccctgaagctgaatatgtagatttgcttcttaatcctgagcgctacactggttacaagggaccagatgcttggaaaatatggaatgtcatctacgaagaaaactgttttaagccacagacaattaaaagacctttaaatcctttggcttctggtcaagggacaagtgaagagaacactttttacagttggctagaaggtctctgtgtagaaaaaagagcattctacagacttatatctggcctacatgcaagcattaatgtgcatttgagtgcaagatatcttttacaagagacctggttagaaaagaaatggggacacaacattacagaatttcaacagcgatttgatggaattttgactgaaggagaaggtccaagaaggcttaagaacttgtattttctctacttaatagaactaagggctttatccaaagtgttaccattcttcgagcgcccagattttcaactctttactggaaataaaattcaggatgaggaaaacaaaatgttacttctggaaatacttcatgaaatcaagtcatttcctttgcattttgatgagaattcattttttgctggggataaaaaagaagcacacaaactaaaggaggactttcgactgcattttagaaatatttcaagaattatggattgtgttggttgttttaaatgtcgtctgtggggaaagcttcaaactcagggtttgggcactgctctgaagatcttattttctgagaaattgatagcaaatatgccagaaagtggacctagttatgaattccatctaaccagacaagaaatagtatcattattcaacgcatttggaagaatttctacaagtgtgaaagaattagaaaacttcaggaacttgttacagaatattcattaaagaaaacaagctgatatgtgcctgtttctggacaatggaggcgaaagagtggaatttcattcaaaggcataatagcaatgacagtcttaagccaaacattttatataaagttgcttttgtaaaggagaattatattgttttaagtaaacacatttttaaaaattgtgttaagtctatgtataatactactgtgagtaaaagtaatactttaataatgtggtacaaattttaaagtttaatattgaataaaaggaggattatcaaattcatatatgataaaagtgaatgttctaagtctctcaaactagcgttttatgtaataatatgtaatataaataaaactatggtaaatgtgacaagcatttaataggaaaatgctaaggaggcctcataaatgacccataattaccaacgtagaatttttcagtacatttagggttgctggatttagcaaataaaaataaagattgcccagttagatttgaatttcagataaacaattagttttttaatattttacatggaatatttggaaaatacttatactaaaaaattatttgtttgaaattcacatttaactgggagtcttgtattttatctggcaatcctaaaatacattggtatgaaacaaatcacttttagaagtatattgctattttgattgggttgtttttgtgtgtagaaacgtacaataacaactcaaaggcacaggagatttctaaacattgtgaaaagttgaatagattatatatttattctcataatactttcactaatactaaataaaatttggggaacactttttatttttatataatttccaatttacagaaaagtttcaaaaatagtacaaagagctctcttacccagattcactaattgttcatacgtgctttatctttcatgctttctctgtacacacacacacacacacaaatttttcctcaatcatttgaaagtcagttataggcatcatgccccttaaaccctaaatacttcagtgtgtaatactgaataattactaaaaatgattttctcagaaaaaaaaactcccacaattctggaactataatactgtaagccttagaataaataatactttcaagttccaatctaaagttctttttgagttttgttgcccgttttatgcttgatgtgtatagtaatagggtaggctatttattttattaaaattttttttagagacaaggttttgctgtgttgcccaagctggaacttgaacgactgggctgaagtgatcttcccacctcagcctcccaagtagctgggaatacaggtgtctgccaccatacccagtttcatttttgttttttatacccgaagttcatttcctttgtctccctaaaactgaactgtaattttgggaggttttcattagtggaagctcttcatttataaagctatttgaaggggtttaggaatttatatcacatggtaattgtagagaaaaagaagctatatacctcaaaatcgtgccctctttacatatgtcttatcaggtataacatgttgaaatgtcacattagtagtaaagtggggtttatttatatagtggttaagaaatgtcagtttacactgctgtatacttcttcttctgtgtccctaaggcctggtacagtgccaagcacatacttggtatccaataaatatttgttggatgaaaaaaaaaaaaaaaaaaaagtatattttaaatgaataatcacagaagtaagtttaataatttgtcctatttttctctgtcacttcctttttctctaaggcaggaaaggaaagacattaaaccattaattaagtcaatcctcttggagactcaaaagactatgaagtgatcactctatataaaatataaatacagtgtgggttcaaatggccattttttgcgtgtccctctctctcatcttatgcttcccttcctttttttattttctattttttggagacggagtcttgctgtgtcgcccaggttggagtgcagtggcgtgatcttagctcactgcaagctctgccttccaggttcacgccattcttctgcctcagccccctgagtagctgggactacaggcgcccgccacacgcccggctaatttttttttaaagggaatttcagtaaaaaggcagggttccca

SEQ ID NO: 8065 - DNA, 2412 bp, Homo sapiens
  misc_feature (2110)..(2173): n is a, c, g, or t
atgcaattaggacgaggtgagcgcagacgtcactctaagctcagacatttcgcagtctcctcccctgagggaaaaccaaatacctccagcccaaatcagggttgtgaggccaaatctgcaagaaggctgcaggcgagagggaaggctccctctgcgcctgaaagcccccaagtcctcgggttggggggaactcttcagcacatccttctctggacaacagaagaagaatcactgtccacaaaatatattaaaactgaaatttttgttcttttagctttcgaatttacacttttgagagcagtgtgattctttcaagtctagcagtgcattaagagggcctgggcgtttccgttccgccctcctcgctaagacaactagcagcggcacctcaggacgcgagccgaggactctaccgcccgacccaggttaagtttcggaggctcctaagatggctgcagccgcttccaggcacctcctcttccgcggccccgcccaccgctacgtccgtcttcgccccggaagtggaagtcgtgctgaggtcagaaggcggaaccgctgctgggagacggcgggatctctttcgccatggctgccgggccgatctccgagcggaatcaggatgccactgtgtacgtggggggcctggatgagaaggttagtgaaccgctgctgtgggaactgtttctccaggctggaccagtagtcaacacccacatgccaaaggatagagtcactggccagcaccaaggctatggctttgtggaattcttgagtgaggaagatgctgactatgccattaagatcatgaacatgatcaaactctatgggaagccaatacgggtgaacaaagcatcagctcacaacaaaaacctggatgtaggggccaacattttcattgggaacctggaccctgagattgatgagaagttgctttatgatactttcagcgcctttggggtcatcttacaaacccccaaaattatgcgggaccctgacacaggcaactccaaaggttatgcctttattaattttgcttcatttgatgcttcggatgcagcaattgaagccatgaatgggcagtacctctgtaaccgtcctatcaccgtatcttatgccttcaagaaggactccaagggtgagcgccatggctcagcagccgaacgacttctggcagctcagaacccggtctcccaggctgatcgccctcatcagctgtttgcagatgcacctcctccaccctctgctcccaatcctgtggtatcatcattggggtctgggcttcctccaccaggcatgcctcctcctggctccttcccacccccagtgccacctcctggagccctcccacctgggatacccccagccatgcccccaccacctatgcctcctggggctgcaggacatggccccccatcggcaggaaccccaggggcaggacatcctggtcatggacactcacatcctcacccattcccaccgggtgggatgccccatccagggatgtctcagatgcagcttgcacaccatggccctcatggcttaggacatccccacgctggacccccaggctctgggggccagccaccgccccgaccaccacctggaatgcctcatcctggacctcctccaatgggcatgcccccccgagggcctccattcggatctcccatgggtcacccaggtcctatgcctccgcatggtatgcgtggacctcctccactgatgcccccccatggatacactggccctccacgacccccaccctatggctaccagcgggggcctctccctccacccagacccactccccggccaccagttccccctcgaggcccacttcgaggccctctccctcagtaaattcacattttccttcctcctgttacattttcccaatatcttttctattccttggaccaatcagagatgctgtagctccttggggcaaaggtactaatccctttcagcacccccactccattcccctttttaatgtaactttttccacaggaggtatttcttttttatgttggtcctgagtattttgcaaatgcacagagaaaataaaactaaactccttgttaaaaaaaaaaaaaaaaaaaaaaaaccnnnnnnnnnnnnnnnnnnnnnnnnnnnnnnnnnnnnnnnnnnnnnnnnnnnnnnnnnnnnnnnnggggccccaagtctttacgcggtaaccccaactttttttgggtaacaaaagtggggcccccttaatagatgaagggcccgatattattaaaaacttaagggccacttggggcccggtccgattttttaacaaacccccccccttggaacacgtggcgcaaaaaaaactgggccttaaaccctcttggggggaagaaaccctctctttggggggggaaaaagagaaaaacccctttttac

SEQ ID NO: 8066 - DNA, 2558 bp, Homo sapiens
ttaaaaaagttacataactcttcatttttttatttccaaatcgtaggtttttttaagctgtagaactgttatctgtaatatcttgctgtagaaatatcaaatcatttgaaaatttgcacattttgtgcaaaactcaatctacggtatcgggctcgtcagatatattaattttacacttcagttttgattggtgagaaagtacccattctcttcaaataatcaaagataattattattttgttttgtttttggaatcaacagggaggcgcaaagtataaagttgctgctaacatatatacatatacatccatattttataagggtgtctatgtatatatagacagtgtgtccacacaaaaaatagatacagttatcagtcagtcagttcttccatgatttagtttttttaaacgtagaaaagctattgtaaacgtctctttccatttattcttaattttttgacatattggtatttctttaaagggaaatgaggaatgcacatcagtgattgattgtcaaacctcaccccctgatttcctacctaatctacccccacctaaccaatcaatcacatccacaaattgttttgtttgtttgttagtcaggcttccaacagagttcaatatttctaacactctagtgcaataaaaattattattaaatagctaagaggtgtgcatgtgggaaaggtcagtgcatatccctttaggaggggagaatgttgtaatatatcagctatcgagttgtttaaaaaaagtgtattcaatcgtatattgtctatagtatgtgctatgaaatttgcatttatgatatgtaacaggggcaaagccaaattcatgttactctgttcagtcagaaacattttgtggcatacagcattcctgggaagtgctgtactttgtttcgttttggttttagttttgcatttagagtgccttataattgatgcctattttaatagcatttctttttagcttttggttcgtatttccattcactgttcgtatctgttactttctattaaagcattatctgtttaccacatgtacaaaaactctttgaataatatgcattcctagttttcagccaagacggggatgttagtgattgtaccagcccaaagcacttggataatcagggcccttcttccttttataatcaatcatcaacatcagaaaaagctacttgttttatttatattcccttccaaatccgctctggaacatgcagtaactgcaccaaacttattttagtaacaaatatcattggcaactttggaatatatttgatattccattaggatttttctaaaaggggaaataaactatatatatatatgtatcttacccccaattcttccaacagaatttctataggaagccatggatgatggcataagtttgccacatattacatgattttaaataatcctcaaaatacccaaggaactcttaaagagttttggtatgagtatactactttggtttaattttagcttcatggatgttctgcatggaaggatttttgttttccacattttcccattgctagcagagtgaaatccaagagaccaaacatttgcaagcattgtatttgagcacttttgtaaaaaacaaaaaaaaaaaaaaaaaaaagaaaatatatataatactaaaaaaaagtatctagaaggctacctcagaatgagactctctaacctacatcagaaccagagaagaatgtgcactatgtgggtctgttatcattattttcttttagtttgtatctttttggagatttatccaagtgccagattactcagtgctataattttcttttagttaaacaaagggggtcagacagacattgcatcatccagacatgccttgttggacatgtagaatccgatggagcactgcacaccagaatgattggccaatgagcagcttctctccctgaaacaataactgcccatttggcaaagggaaagatgacaataatcagaagaagaaaatgaatgggatgcataccatagacgaacgaggcggagactattgcgggaatcttactgttcaggagctgttcctagaactaactcccttactgtcattgatgtgcattccactctgtgcttttctgtacaaccattcaagttttaatttcccaggtgaaccatctttatctgccattaccacaagctttcaagtttccagttattttcatcatcataaccagtacggtgctattatttacctatgtacgtgtagttatgtatatttgtaattagttacaatggtaacaacaatcaaatattaaaagtgatttgtacagaacttatttaggctctttttttaacaatgattgcatggttagaaaacggcgaggacaggccggagggaggggctctaggacttggctttctttaccttgttatttggctggccttttgttttaccattatggttttttgaacttgtaagaagggttggaatcttgggtttttgttgcccttatcggagggaattggagagcgttttcggaaacggggaagctttatcccggttggcggcgggaaggac

SEQ ID NO: 8067 - DNA, 1358 bp, Homo sapiens
  misc_feature (741)..(741): n is a, c, g, or t
  misc_feature (797)..(798): n is a, c, g, or t
  misc_feature (935)..(935): n is a, c, g, or t
  misc_feature (1061)..(1061): n is a, c, g, or t
  misc_feature (1297)..(1298): n is a, c, g, or t
  misc_feature (1301)..(1301): n is a, c, g, or t
tattgttgggaactattttttcgaaattattgctgaaacttaaaggatgggttaatatgcagcaatactattttggacagaattgccaaacattgtattttcttattcaaggatctttagtcttcttttagacaggtggacccttttttctttttcttttttttttttttttttaagtattgttaacaatcctttggaagtcactactggtctttgtgtgctgctttttaataattgagttattttgagcttgccaagtaggatctattgcctggactaaaatttatttcctaatcttctgatgaccaagaaaggaaaaattaagtttgcagatgtgagatgaaatatagccagtgaatatgcatactgattctgaatgaaaggaattaacttttcagtcaagaaacagtctgcatgcagtaaattgaatttttcctgcaactggaatgatttgtttaattcttctttgaacactgccctttctccagtaagaacactaatgatttgctaatattttttaaagaaatctgtttttttaattagttaagctcagacttcctcttattttttatcctagagaaaactgctaaaagggaatgatatatcagtactattcttctaaaacaactttttaaaaatgattatacaaagccaaatatgctcattcatataaatttagaacgcaaaaagaagggaactaaaaattttccattaatcctacccagcctgaagattatgggncgttaagaaaaataatccccctttcataacccgggttttcccaatgccaatggcanncaaaacacccttatgggggaaggccccattaattttaataaaatttcttaattccctaaaaaaaaattaaggaggaaacccggggccgggaaaacactaattttggtttttttatacacaaattccctaaaagggcnccctcaataaaaatccttataaaaaaaaatatcttccctcttttatagccgcctcttatttttttttttggggagggaaaaaaacatttttttaataaaacccccccttttttctccccaaaaaanaaattctactcttttcgcaaagtgggggcgccctttctttaagcaccccccaccctcctcaccttggggaggttctttttctatattaaaaaaaaataattttttttaaaccacacccctcctccccccgccgcgcgggtgttgcggaagaaaataaaacgcgcccctcccacaataaaaaagccgccgccccaaaaaaaaaattttttttctcctctttccccccccccccccgnnaanacccaaacacttttattttttttttttctcacaccaccctctctttttttaaaaaat

SEQ ID NO: 8068 - DNA, 1215 bp, Homo sapiens
gccagatatggcggctcatgcctgtaatcccagcgctgtgggagcctgaggcgggtgggtctcttgaggccaggagttcaagaccagcctggacaatgtggtgaaaccctgtctctactaaaaacacaaaaattagctgggcgtggtggcgcatgcctcattcacgtacatgggagagtctacaaagtcacacgtattcataggttaagccacatgctgacaaatgtcataagaagaccctacacttttaccttggccgatccctcccctcagtgcaagctctgtgcaagagtgaacttgaacttcactcagtgcaagagtgaacacacactttgtgccggctttaaagaacccagcacaaagccagtctgcatggcctacagacatattttgctggacaatgattacttgcttttctttttgtttttcttgtatttgcctgtttgattggctcctgacataccagaaaatcactgtcaaaacattagcttaacatttgttaaggaaacaaaaagacttcggtgaccacaccttataaaccaaacagttttgtaaatcactttggaaaatttcactaaaaaaaaaatccttaacaatataataagtaaagaaaatttaaaaccacaaaacattactgtgttggtagggggaggtctgatttacagagtaacacatagtaattataattatcagaatgtccagttttcaaaaaacgttacaaggcatacaaagaactgcgacagtgttggctccattccacagcgaaccaaaattcaagtgaccgaaaatattccctaagggaaacccagaacttaacttaccagacaaaggcacttggaacacatcctcttccattatactccaatggtccaaggacacgtttaacccaagcaacactacgggactcgaagcatgttctaaacgcttcggaattccggcccggcataccacaattctgggctgggagaaccactaccgggttaaatttaactcaccaaggaggataacagagctatttgtcgccctaacaggaccccgataagttctaaagaaaaagtagacctgcgctactaaagactactactaacagtacaggaacaagcgagctacttcaaagccaataatatttcaagggagtgtagaccaacttccgtggatatctatcgacatctatgtgagtgacgaagcacgaccacactactacacaacactaag

SEQ ID NO: 8069 - DNA, 6926 bp, Homo sapiens
  misc_feature (2205)..(2232): n is a, c, g, or t
  misc_feature (4483)..(4503): n is a, c, g, or t
gggctcagccgcggagtgagcgaggcacgagggaggagccgaacccggcgccatccgccgccatcctcccccgccccaccgccatcccgtcccggggagcccctaggcccgggtcccggatccccgcgcacccggccaggctctggcacgttttgggggaggtgcctgcaggacccaacatactcaatgagcttccagcgcaatgtccgatcgctcggggccgactgccaagggaaaggatggaaagaagtattcctcgctcaacctgtttgatacgtataagggcaagtccttagagatccagaaacccgctgttgcccctcgccatggcctgcagagtctcgggaaagttgccattgcccggcgtatgccacctccagccaaccttccaagcctgaaagccgagaacaaaggcaatgaccccaatgtctcactagtgccaaaagacggaacaggatgggcaagcaaacaggagcagtccgaccccaagagttccgatgcctcaaccgctcagccgccggaatcgcagccactgccggcttcacagacgcctgcctccaaccagccgaaacgacccccagcagcccccgagaacactcctttggttccaagcggggtaaagtcctgggcacaagccagcgtcacccatggagcacatggagatggtggaagggcatcaagcctactgtcacgattctctcgagaggaatttccgaccctgcaggcggctggcgaccaggacaaggctgccaaggaaagggagtctgccgaacagtcgtctgggcccggaccaagcctccgcccccaaaattctacaacttggagggacggaggtgggcgtggccctgatgagctggagggcccggactccaaacttcatcatggtcatgatccccggggtgggctacagccttcaggcccaccccagttccctccctaccgcggaatgatgccgcctttcatgtatcccccatatctcccgttccctccgccctatggaccccaggggccttaccgataccccactcctgatgggcccagccgttttccccgtgtggcgggcccccgaggctcagggccaccaatgcgcttagtagagcctgtgggtcgtccctctattctcaaagaggataatctcaaagagtttgatcagttggatcaggagaatgatgatggttgggcaggggcccatgaagaggttgactacactgaaaagctcaagttcagcgatgaggaagatgggcgagactctgatgaggagggagctgagggccacagggattcccaatcagcttctggtgaggaacggccccctgaagcagatggcaaaaagggcaactcccccaacagcgaaccgcccactcctaagacggcctgggcagaaacctctcggcctccagagacagagccgggacctcctgccccaaagcctcccctaccccctggggactacccagatcgtgggggtcctccctgcaagcccccagcacctgaagatgaggatgaggcatggcggcagcgacgaaagcagtcgtcatctgagatttccctggcagtggagcgggcccggcgacggcgagaagaagaggagcggcgcatgcaagaagagcgccgggcagcctgtgctgagaagctcaagcgactcgatgaaaagtttggggcacctgacaagcggctcaaagcagagcctgctgccccacctgctgccccttctaccccagctccaccacctgcagtccctaaagaactccctgcacctccagctccacctccagcatcagccccaacaccagagaaagaacctgaagagccagcacaggcccctcctgcccaatctactcctactccaggtgtggctgcggctcccactctggtgagtggtggtggcagtaccagtagcaccagcagtggcagcttcgaagccagcccagtggaaccacaactgccctcaaaagagggtcctgaaccaccagaagaggttcctcctcctaccacacccccagttccaaaggtggaacccaagggtgatgggattggtcccacccgccagccccctagtcagggcttgggctaccccaaatatcagaagtcgttgcctcctcgtttccagcggcagcagcaggagcagctcctgaagcagcagcagcagcaccagtggcagcagcatcaacagggctctgcccctcctaccccagtgcccccatnnnnnnnnnnnnnnnnnnnnnnnnnnnngctgtgccagctccacaggctccacccccgccccccaaggccctgtacccaggtgctctgggccggcccccacccatgcccccaatgaactttgatccccgatggatgatgattcctccttatgtggacccccggctcctccagggtcgtccccctctagacttctaccctcctggtgtgcatccctctggcctagttccccgagagcgttcagacagtgggggctcaagctcagagccatttgaccgtcatgcacctgctatgttacgggaacggggcactccaccggtggatccaaagttggcctgggtaggagatgtcttcaccgccacacccgctgaaccccgcccacttacctcacctctgcgccaggctgcggatgaggatgacaaggggatgaggagcgagactcctccagtacctcccccaccaccctatctggccagttatccaggctttcctgagaatggagcccctgggcccccaatctctcgctttcctctggaggaaccagggccccgtccactcccctggcccccaggcagtgatgaagtggccaagatacaaactccaccacccaagaaggagccccctaaggaggagactgcacagctgacggggccagaagcaggccgaaagcctgcccgcggagtcgggagtggaggccagggccccccaccaccacgcagagagagtcgcacagagacccgctggggccctcgtccagggagcagtcgtcgtggaatccctccagaggagccaggggccccaccccgccgggctgggcctataaagaaacctccaccacctacaaaagtagaagagctgcctcccaagccccttcgaatgggggatgaaacccccaaacccccaaagccagacccactcaagataaccaaggggaagctagggggccccaaggagaccccacccaatggaaatctttcccctgccccaaggcttcggagggactattcgtatgaaagagtgggtcctacctcttgccggggtcggggccgaggcgagtattttgccagagggaggggttttcgggggacctatgggggacgagggcggggagcccgaagccgggaattccgcagttaccgagagtttcgaggagatgatgggcgtggaggtgggacagggggaccaaaccaccctcctgctccccgaggccgcactgccagcgagacacggagcgagggttcagagtatgaggaaatccccaagcggcgccggcagcggggctcagaaacaggcagcgagacccatgagagtgatctggctccttcagacaaggaggctcccacacccaaggagggaacactcacccaggtccctctcgctcccccaccaccaggagccccaccttcaccagccccagcccgcttcactgcccggggtgggcgagtcttcactcccagaggggtgccatctcgccggggccgaggaggagggaggccccctcctcaagtttgcccaggctggagccctccagccaagtctctggctcccaagaaacctcccacaggccctttgccaccaagtaaggagcctttgaaagagaagttgatcccagggcctctgtcccctgtggcgcgcggaggcagcaatggaggtagcaatgtgggcatggaagatggggagcgaccccgaaggaggcgacatgggagggctcagcagcaggataaaccgcctcgtttccggaggctgaagcaggaacgggagaatgccgcaagggggtctgagggcaagccctccctaacccttccagcctccgctcctggacctgaggaggccctcacaacagtcacagtggccccagcacctcgccgggcagctgccaagtctcctgatctgtcaaaccagaactcagaccaagccaatgaggaatgggagactgcatcagagagcagtgacttcaccagtgagcgccgaggggacaaagaggcacccccaccagtactgctgacacccaaggctgtgggaactcctgggggaggtggaggtggagccgtaccaggtatttcagccatgtcccgcggagatctgagccagagagccaaggatttgagtaaacggagcttctcaagtcagcggccaggcatggaacggcagaatcggcgccctggcccagggggcaaggctggcagcagtggcagcagcagtggaggaggcggtgggggtcctggaggaaggaccgggccaggacgaggcgacaagaggagctggccctctcccaagaacnnnnnnnnnnnnnnnnnnnnnagcgtcccccggggcttcccctgcctcccccacctcccagcagttctgctgtcttccgcctggaccaagttatccacagcaaccctgctggcatccaacaggctctggcccagcttagtagccgtcaagggagtgtaactgcaccagggggtcatccaaggcacaagcctgggcctccccaagcccctcagggcccctctcctaggcccccaacccgatacgagccccagagggtcaacagcggcctcagttctgacccccactttgaggagccggggccaatggtgagaggggtgggtgggactcctcgggactctgccggggttagtccctttccccctaaacgtcgggagcggcctcccagaaaaccagagctgctacaggaggaatctttgccacctcctcatagctctggattcttgggctctaagcctgagggcccaggccctcaggcagagtccagagatacaggcacagaggccctgacccctcacatctggaaccgtttacatactgccactagccgaaagagttaccggcccagctccatggagccttggatggagcccctgagtccttttgaggatgtggctggcacagaaatgagtcagtctgacagtggggtggacctgagtggggattctcaggtgtcatcaggtccctgcagccagcgaagttcccctgatggaggactcaagggggcagcagagggaccccccaagaggcctggaggctcctcacccctgaatgctgttccttgtgagggtccacctggctctgaacctcctaggagaccaccacctgccccccacgatggggacagaaaggagctgccccgggagcagcctctgccccctggccccattggcacagaacgatcacagcgtacagaccgaggcacagagcctggccccattcggccatcccatcgacctggtcccccagtccagtttggcactagtgacaaggactcagacttacgcctagtggtaggagacagcttgaaagcagagaaggagctaacagcatcagtcactgaggccattcctgtatcacgagactgggagctgcttcccagtgctgctgcctctgctgagccacaatccaagaacctggattctgggcactgtgtcccggagcccagctcctcaggccagcgcctgtatcctgaggttttctatggcagtgctgggccttccagttctcagatctctgggggagccatggactctcaattacatccaaacagtggaggcttccgccctgggacaccctcactgcacccttacagatcacagcccctatacctacccccccggcccagcccctccctcagcactgctctctggggtagctctcaagggccagtttctggatttctccacaatgcaagctacagagctggggaagttgccggctggaggagttctctaccctccaccttccttcctctactctccggctttctgccccagtcctttgcctgacacatcgttgcttcaggtacgccaggatctgccatccccttcggatttttattctactcctctgcagcctggtggccaaagtggctttctcccttcaggggctcctgcccagcagatgcttctacccatggtagactcacagctgcctgtggtgaactttggctccctgccgccagcaccacctcctgccccacctcccctttctctgttacctgtgggccctgctctgcagccccccagcctggctgtgcggcccccacctgctcctgctactcgggtgctgccttcacctgccaggcccttccccgctagcttggggcgagcagagctgcatccagtggaactaaagccgttccaggattatcaaaaactgagcagcaaccttgggggacctggatcatcacggactcccccaactggaaggtccttctctggcctcaattcccgtctcaaggccacgccttccacctacagtggagtcttccgcacccagcgcgtcgacctttaccagcaggcctccccaccagatgccctgcgctggatacctaagccttgggagcggacagggccgccacctcgagaagggccctcccgacgggcagaggagcctgggtcccgaggggacaaggagcctgggttgcccccaccccgctgagggagttcctcttgccccctacccccggggcttgtatatagattataaatatataagggggaaaggggtgggcggggaggggttgtggggctggggcctcacttcccctcctcccccttcccctggtcccctgtccctggggctgtttgttaaaaaagagtaataaaaggatttaaaaaaaaaaaaaaaaaaaaaaaaaaaaaaaaaaaaaaaaaaaaaaaaaaaaaccacaaaaataaaaaaaccatcaatcccacaaaaaaaacaaacacaaccaatag

SEQ ID NO: 8070 - DNA, 3268 bp, Homo sapiens
  misc_feature (1065)..(1081): n is a, c, g, or t
  misc_feature (1190)..(1191): n is a, c, g, or t
  misc_feature (1380)..(1423): n is a, c, g, or t
  misc_feature (1435)..(1524): n is a, c, g, or t
  misc_feature (1542)..(1613): n is a, c, g, or t
  misc_feature (1730)..(1755): n is a, c, g, or t
  misc_feature (2972)..(2972): n is a, c, g, or t
  misc_feature (2978)..(2978): n is a, c, g, or t
cacgccccgcgctccacggcgccctcgccccgcgcgcctctcgtgcccgcctcctgccagtctccgggccgcggccgtctgcagagcgagcgctcagacggagcccccgggcaacttgagtggcgccgatcggcggcggagcctctggcagagccccccgacccggcagcgcggaggggactcgcgtccgtccgcgtcgcgtcaccccaaaccctaagcagcgccgccccatcggcgcggagctccggctggaggcaagagccgcgcgccgggagacacgcaccgtgagcggcagcgccgccggcctccctcctcgccgccccggaggcgaagccgcggctccccagccctttgctgcgccgcgacagcgccggaacacgccccgcctcgctgccgccttcgctgtgccgccggcggagggggccgcgagccccgcgccccggccggaggatgtgcgcccccgcgggccgcccagcctgagccatgcgccccaacggcggcggcgcgccggccggcatggagccccgcgcggccgcgctctgactcgctgtgcgccccgcggccggcgggcggcgggaggcggcggaccgagagccggagaccggcgccgcgggacggaagcgagcgggcgcgggcgccgcgcagatggcctgggcgagccaggtctgaggccccgctccccgaaacgtgaccatgtggattcaacagcttttaggactcagctccatgtccatccgctggccgggccgccccctcggaagccatgcctggatactgatagccatgtttcagctcgccgtggacctgcccgcctgtgaggccctgggcccggggccggagttctggctcctgccgcggtcgccgccccggccgccccggctgtggagttttaggagtggacagccagcgcgggtcccggccccggtgtggagcccccggccgccccgagtggagcggatccacgggcagatgcagatgcctcgagccagacgggcccacaggccccgggaccaggcggccgccctcgtgcccaaggcaggactggccaagcccccagctgctgcnnnnnnnnnnnnnnnnntcgcctcttcgtcctcgtcctcgtcctccgcggtggccggtggggccccggagcagcaggccctcctgaggaggggcaagaggcacctgcagggggacggtctcagcannttcgactccagaggcagccggcccaccacagagactgagttcatcgcctgggggcccacgggggacgaggaggccctggagtccaacacatttccgggcgtttacggccccaccacggtctccatcctacaaacacggaagacaactgtggccgccaccaccaccaccaccaccacggccacccccatnnnnnnnnnnnnnnnnnnnnnnnnnnnnnnnnnnnnnnnnnnnnagaaggatcccnnnnnnnnnnnnnnnnnnnnnnnnnnnnnnnnnnnnnnnnnnnnnnnnnnnnnnnnnnnnnnnnnnnnnnnnnnnnnnnnnnnnnnnnnnctggctgtccatcagatnnnnnnnnnnnnnnnnnnnnnnnnnnnnnnnnnnnnnnnnnnnnnnnnnnnnnnnnnnnnnnnnnnnnnnnngtgcccaaagcgggaacactcgtcggaacagccaccagcggaagaccaaccagcaggaggagagctgccagaacctcacggacttcccctcggcccgggtgcccagcagcctggacnnnnnnnnnnnnnnnnnnnnnnnnnngtagtgttctcacgagtgcgtcagggcatctgtgcccgtgtacaccgatgagacgctgcactcgacgacgggggagtacaaatccacatttaatggaaaccgaccctcctcttctgatcggcatcttattcctgtggccttcgtgtctgagaaatggtttgaaatctcctgctgactggccgaagtcttttttacctcctgggggcagggcagacgccgtgtgtctgtttcacggattccgttggtgaacctgtaaaaacaaaacaaacaaaacaaaacaaaaaagacaaaacctaaaactgagctatctaagggggagggtccccgcacctaccacttctgtttgccggtgggaaactcacagagcaggacgctctaggccaaatctatttttgtaaaaatgctcatgcctatgggtgactgccttctcccagagttttctttggagaacagaaagaagaaaggaaagaaaggaaccagaggcagagagacgaggatacccagcgaaagggacgggaggaagcatccgaaacctaggattcgtcctacgattctgaacctgtgccaataataccattatgtgccatgtactgacccgaaaggctcggccgcagagccggggcccagcgaatcacgcagagaaatcttacagaaaacaggggtgggaatctcttccgatagagtcgctatttctggttaatatacatatataaatatataaatacaaacacacacacacactttttttgtactgtagcaatttttgaagatcttaaatgttcctttttaaaaaaaagaattgtgttataggttacaaaatctgatttatttaacatgcttagtatgagcagaataaaccagtgttttctactttggcaactcacgtcacacacatattacacacatgtgcgcatacacacacacaatacacatacatgcatatagacgcatctattggaaatgcagttccacaggtgagcatgttctttctggtgacctggtattccatcaccattcaccccaggggacagcctcgaccgagacaaggaggcccttaaatgacagcctgcatttgctagacggttggtgagtggcatcaaatgtgtgacttactatcttgggccagaactaagaatgccaaggttttatatatgtgtgtatatatatatatatatatatatatatatatatatatatatatgtttgtgtgcgcacanacacanatatatatatatgtttgtgtgtgtatatatatgtttgtgtatatatatacacatatgcatacatatgattttttttttttcatttaagtgttggaagatgctacctaacagccacgttcacatttacgtagctggttgcttacaaacgggcctgagcccctggttgggtgggtggtggattcttggacgtgtgtgtcatacaagcatagactggattaaagaagttttccagttccaaaaattaaaggaatatatccttaaaaaaaaaaaaaaaaaaaaaaaaaaaaaaa

SEQ ID NO: 8071 - DNA, 1995 bp, Homo sapiens
taaaaatttgatcctaagattctataaagtagccattgaggcttaccaaagttacaatattacagatggatcaggggagacggttgctatggagatggatgatatcataactccattgtgaaccagtaagaacactctcgtgagtctaacggtcttccggatgaaggctatttgaagtcgccataacctggtcagaagtgtgcctgtcggcggggagagaggcaatatcaaggttttaaatctcggagaaatggctttcgtttgcttggctatcggatgcttatatacctttctgataagcacaacatttggctgtacttcatcttcagacaccgagataaaagttaaccctcctcaggattttgagatagtggatcccggatacttaggttatctctatttgcaatggcaacccccactgtctctggatcattttaaggaatgcacagtggaatatgaactaaaataccgaaacattggtagtgaaacatggaagaccatcattactaagaatctacattacaaagatgggtttgatcttaacaagggcattgaagcgaagatacacacgcttttaccatggcaatgcacaaatggatcagaagttcaaagttcctgggcagaaactacttattggatatcaccacaaggaattccagaaactaaagttcaggatatggattgcgtatattacaattggcaatatttactctgttcttggaaacctggcataggtgtacttcttgataccaattacaacttgttttactggtatgagggcttggatcatgcattacagtgtgttgattacatcaaggctgatggacaaaatataggatgcagatttccctatttggaggcatcagactataaagatttctatatttgtgttaatggatcatcagagaacaagcctatcagatccagttatttcacttttcagcttcaaaatatagttaaacctttgccgccagtctatcttacttttactcgggagagttcatgtgaaattaagctgaaatggagcatacctttgggacctattccagcaaggtgttttgattatgaaattgagatcagagaagatgatactaccttggtgactgctacagttgaaaatgaaacatacaccttgaaaacaacaaatgaaacccgacaattatgctttgtagtaagaagcaaagtgaatatttattgctcagatgacggaatttggagtgagtggagtgataaacaatgctgggaaggtgaagacctatcgaagaaaactttgctacgtttctggctaccatttggtttcatcttaatattagttatatttgtaaccggtctgcttttgcgtaagccaaacacctacccaaaaatgattccagaatttttctgtgatacatgaagactttccatatcaagagacatggtattgactcaacagtttccagtcatggccaaatgttcaatatgagtctcaataaactgaatttttcttgcgaaaataaaaaaaaaaaaaaaaaaaaaaaaaaaaaaaaaaaaaaaaaaaaaaaaaaaaaaaaaaaataattaaaaagaaaaataaaaatagaaaaaaaaagaataaaaagaaaaataaacaaaaaaaaacaaaaatgagggggggggcggccacctatatattttttcctgggcggaggcgcaaaaaaatattatgagcacgagccttttttgttttaaaaaggggcgcccccattatgatgggagatttttataataagaaaggagcacgtgtctttacaacaaagctggtgtgtgaggaaaaaacaaatctgttggatgtattgtggggagagaaacccatcttgtgggggtgagagaaaattatgaagccaatccataaggagaaataatgccagggggataaaataaaatgagtgatgtgtgtgtaccagtatatttctggcgagaagatgtccggggtgatttataattagcggtgatgataattagaagtgaggtagatgt

SEQ ID NO: 8072 - DNA, 3328 bp, Homo sapiens
  misc_feature (1845)..(1850): n is a, c, g, or t
gcgcgcggcgcaggagccgagcccagcccgggggacccgccgccgccggtcatgtgggccggactgctccttcgggccgcctgtgtcgcgctcctgctgccgggggcaccagcccgaggctacaccgggaggaagccgcccgggcacttcgcggccgagagacgccgactgggcccccacgtctgcctctctgggtttgggagtggctgctgccctggctgggcgccctctatgggtggtgggcactgcaccctgcccctctgctccttcggctgtgggagtggcatctgcatcgctcccaatgtctgctcctgccaggatggagagcaaggggccacctgcccagaaacccatggaccatgtggggagtacggctgtgaccttacctgcaaccatggaggctgtcaggaggtggcccgagtgtgccccgtgggcttctcgatgacggaggcagctgttggcatcaggtgtacagacattgacgaatgtgtaacctcctcctgcgagggccactgtgtgaacacagaaggtgggtttgtgtgcgagtgtgggccgggcatgcagctgtctgccgaccgccacagctgccaagacactgacgaatgcctagggactccctgtcagcagagatgtaaaaacagcattggcagctacaagtgttcctgtcgaactggcttccaccttcatggcaaccggcactcctgtgtagatgtaaacgagtgtcggaggccattggagaggcgagtctgtcaccattcctgccacaacaccgtgggcagcttcctatgcacatgccgacctggcttcaggctccgagctgaccgcgtgtcctggggaagcttttcccgaaagccgtgctggccccatctgccatcctgcaaccccggcaacacccgtccaagatgcttctgttgcttcctgaggccggccggcctgccctgtccccaggacatagccctccttctggggctccagggcccccagccggagtcaggaccacccgcctgccatctcccaccccacgactacccacatcctccccttctgcccctgtgtggctgctgtccaccctgctggccaccccagtgcctactgcctccctgctggggaacctcagacccccctcactccttcagggggaggtgatggggaccccttcctcacccaggggccctgagtccccccgactggcagcagggccctctccctgctggcacctgggagccatgcatgaatcaaggagtcgctggacagagcctgggtgttcccagtgctggtgcgaggacgggaaggtgacctgtgaaaaggtgaggtgtgaagctgcttgttcccacccaattccctccagagatggtgggtgctgcccatcgtgcacaggctgttttcacagtggtgtcgtccgagctgaaggggatgtgttttcacctcccaatgagaactgcaccgtctgtgtctgtctggctggaaacgtgtcctgcatctctcctgagtgtccttctggcccctgtcagacccccccacagacggattgctgtacttgtgttccagtgagatgctatttccacggccggtggtacgcagacggggctgtgttcagtgggggtggtgacgagtgtaccacctgtgtttgccagaatggggaggtggagtgctccttcatgccctgccctgagctggcctgcccccgagaagagtggcggctgggccctgggcagtgttgcttcacctgccaggagcccacaccctcgacaggctgctctcttgacgacaacggggttgagtttccgattggacagatctggtcgcctggtgacccctgtgagttatgcatctgccaggcagatnnnnnngtgagctgcaagaggacagactgtgtggactcctgccctcacccgatccggatccctggacagtgctgcccagactgttcagcaggctgcacctacacaggcagaatcttctataacaacgagaccttcccgtctgtgctggacccatgtctgagctgcatctgcctgctgggctcagtggcctgttcccccgtggactgccccatcacctgtacctaccctttccaccctgacggggagtgctgccccgtgtgccgagactgcaactacgagggaaggaaggtggcgaatggccaggtgttcaccttggatgatgaaccctgcacccggtgcacgtgccagctgggagaggtgagctgtgagaaggttccctgccagcgggcctgtgccgaccctgccctgcttcctggggactgctgctcttcctgtccagattccctgtctcctctggaagaaaagcaggggctctcccctcacggaaatgtggcattcagcaaagctggtcggagcctgcatggagacactgaggcccctgtcaactgtagctcctgtcctgggcccccgacagcatcaccctcgaggccggtgcttcatctcctccagctccttttaagaacgaacttgatgaaaacacagactttacctacaagcccggcaggagctcatggtccacactcactcgctttggggctgacagccactttcccaggggagcctggggcctcccctcgactctcaccagggccttcgacccctccaggagcccccactctacctctagcttccccaggggctcctcagccacctcctgtgactccagagcgctcgttctcagcctctggggcccagatagtgtccaggtggcctcctctgcctggcaccctcctgacggaagcttcagcactttccatgatggaccccagcccctcgaagacccccatcaccctcctcgggcctcgcgtgctttctcccaccacctctagactctccacagcccttgcagccaccacccaccctggcccccagcagcccccagtgggggcttctcggggggaagagtccaccatgtaaggaggtcactgtgtccgggagactctggagagaggacctctgccagtggcccagggtgtgtgcagggcagctccaaggatgaacctggtggggatgcctgggctccctcctgcaggggccctggtgaggatggaagacccccaaggctggatgtaaccttgttcccaagaagtgtttggaatgtgctgtaagaatggaggaagtcgtttccactgtcagcatcctccctggaccgcgtggctggctcatcttttgagaagggttgggactgccaagttctcctggaggaagagttgcgtccggctgggattccactcactgggactgtaccgccaggtgtcatgcgtctctctgaggtttcctgattaaaggttgtctcggtttcccaaaaaaaaaaaaaaaaaaaa

SEQ ID NO: 8073 - DNA, 6258 bp, Homo sapiens; identical to SEQ ID NO: 6447

SEQ ID NO: 8074 - DNA, 895 bp, Homo sapiens
ggtgaccagaatgtcagtgcagttggcagctgagggtgtttgtgtgacctgaggtcaccctttgtaagaggctccctggggcctgcatggtacatcctcccctctcctgggggaacccagcatggcccaggatttgtggattgcttagaaagatccttttgggcagcctgaagactggggagggttttcctccctcctccacctccacccacattccacttaccctttccctcctcatcccagttggtaacattcccacctgattaagtgtggggagttgctgctgcagctgagttctggttttgcccagcaggattcacacacgtgcggccaggaggctggcaggtggaatcagggtgtgcaggggtgcagcccaagtccttttctgctggaaaatgggctgggtgacttcacttgcgtttttttggtatgtagtgggagtaggtccccattcttcccccttgccctttgctttggggtttctaccctaaaaattgaccacggaaaagtgaaaacaagcatgagtagatcctgcttccaatgggggccttcccgtctgcttactgcttaggtttctgcggtgggtctgagcaatgcagaaagtttcttacaatttctctggattgaaacaagaaatagctccctcgctcctcttcataaatttctcagagaaaatctaagttaccaggaagtagccaaagaccaggagattgtggaatcaaaaagaaaaaaataaacaaaaatcttctgacagtcacgtcctcagatgagatgatgaagagctatgtggcctgggacagagagaagcggctgagctttgcagtgccctttagagagatgaaacctgtcattttcctggatgtgttcctgcctcgagtcacagaattagcgctca

SEQ ID NO: 8075 - DNA, 457 bp, Homo sapiens
  misc_feature (363)..(363): n is a, c, g, or t
  misc_feature (449)..(449): n is a, c, g, or t
tcctgcacacaccatttgcccatggatcgcagtacacagtgagttccacaggtctagattgcattggaaggtcacaggccaccaacacagcttcaagggctggctaggaaaagaaggtgaccaattgataccgtgcgtgcaataatatgctcacaaagccagaggtcagaactatgacccctctttagatagattgcccagattcggtaaaaagtaacaaccagaaggaaaacaaaagccatatattttcctgctctatccaatctgaaaatgacacttttatcctgtttaaattactcagcttatcttcaaattcagctctaaaacgctgtgggttaggagggtacttgaaaaatgccaaantactctttcagtttgttattttctcgggtattttgctattttctcgggtggttttgccattcattttagggtggggaggaggttcngctttact

SEQ ID NO: 8076 - DNA, 2831 bp, Homo sapiens
  misc_feature (2783)..(2814): n is a, c, g, or t
gccgggtgtcagcgaacccctttcccaaaccttcggggagaagggaggtgggaggaggcaaagaaactacaggcagtgagctggaagggggggtggggggggcaggagacaagaaatcaagacaccaggcagcaggacacacacacactcacatacactcacacacatagagaccaacagatagacagctacctaaagcctgaaagactgacagcaacacagaaaaaaagaaacaggcagaaagagagacaaagacagaaatagaaacagactaacacacagagtcaaaaatacagagacagaaagacagggagaaagagaaacagaaaattagacaccaaagacatacgaacagggaggaaggccgactgaaagaaagacggagaagaggagagagaagccagggccgagcgtgccagcaggcggatggagggcggcctggtggaggaggagacgtagtggcctgggctgagctgggtgggccgggagaagcgggtgcctcagagtgggggtgggggcatgggaggggcaggcattctgctgctgctgctggctggggcgggggtggtggtggcctggagacccccaaagggaaagtgtcccctgcgctgctcctgctctaaagacagcgccctgtgtgagggctccccggacctgcccgtcagcttctctccgaccctgctgtcactctcactcgtcaggacgggagtcacccagctgaaggccggcagcttcctgagaattccgtctctgcacctgctcctcttcacctccaactccttctccgtgattgaggacgatgcatttgcgggcctgtcccacctgcagtacctcttcatcgaggacaatgagattggctccatctctaagaatgccctcagaggacttcgctcgcttacacacctaagcctggccaataaccatctggagaccctccccagattcctgttccgaggcctggacacccttactcacgtggacctccgcgggaacccgttccagtgtgactgccgcgtcctctggctcctgcagtggatgcccaccgtgaatgccagcgtggggaccggcgcctgtgcgggccccgcctccctgagccacatgcagctccaccacctcgaccccaagactttcaagtgcagagccatagagctgtcctggttccagacggtgggggagtcggcactgagcgtagagcccttctcctaccaaggggagcctcacattgtgctggcacagcccttcgccggccgctgcctgattctctcctgggactacagcctgcagcgcttccggcccgaggaagagctgcccgcggcctccgtggtgtcctgcaagccactggtgctgggcccgagcctcttcgtgctggctgcccgcctgtgggggggctcacagctgtgggcccggcccagtcccggcctgcgcctggccccaacgcagaccctggccccgcggcggctgctgcggcccaatgacgccgagctcctgtggctggaagggcaaccctgcttcgtggtggccgatgcctccaaggcgggcagcaccacgctgctgtgccgcgacgggcccggcttttacccgcaccagagcctgcacgcctggcaccgggacacggacgctgaggccctggagctggacggccggccccacctgctgctggcctcggcttcccagcggcccgtgctcttccactggaccggtggccgcttcgagagacgcacagacatccccgaggccgaggatgtctatgccacacgccacttccaggctggtggggacgtgttcctgtgcctcacacgctacattggggactccatggtcatgcgctgggacggctccatgtttcgtctgctgcagcaacttccctcgcgcggtgcccacgtcttccagccactgctcatcgccagggaccagctggccatcctaggcagcgacttcgccttcagccaggtcctccgccttgagcctgacaaggggctcctggagccactgcaggagctggggcctccggccctggtggccccccgtgcctttgcccacatcactatggccggcagacgcttcctctttgctgcttgctttaagggccccacacagatctaccagcatcacgagatcgacctcagtgcctgagaccaccaacgggactctgggcatggctggggcccctggacggccccttggctggctcctggccctacttggggtgatggcccgcctgtgagctgctgaccgtgggccacgttcatcagccacacgtctaggccttaagcccacttcttaaaggatctgcacccatggggggacatagagggtcccagcctactggacctcccgagctgcccttcaggtctaaagcaacatctggacatctcggctggggcagattccccatcaaaggcaacctggggggtgcaggctggtgcactgcatggagtcgaggtggaggtcacgtgcagagctccatgaggtcccggagcccccctctcaacccgctcctaccccgctggtccctctgaaagcaccgaggggttgatggcattcctttcccattctaaactccacgcagccaatcgctttcctggaggagcgccaacctcgaagacaactcagcactgggcgggttcccctctgctgcttgtgcgcatgcgtgcggccgcccagcaagctgtgccttttgcgcctcttgcgcgtgcgccggggcacagggagggacagcgggaggtgtcgcggggagcctggtgcccttctagatgggcgacggaggcaaggacaagacgagnnnnnnnnnnnnnnnnnnnnnnnnnnnnnnnnaaaaaaaaaaaaaaaaa

SEQ ID NO: 8077 - DNA, 2356 bp, Homo sapiens
aaaggaccgaggcgtgcagcggacagcagatggatcccgcggccagcagctgcatgaggagcctccagcccccagcccctgtctggggctgccttcgaaacccccactcggaaggcaatggggcctcagggctaccccactacccgcccaccccgttctccttccaccagaaaccagacttcctggcgacagcgacggcagcgtaccctgacttctcagcctcctgcctggcagccaccccacacagcctgccccaggaggagcacatcttcactgagcagcaccccgctttcccacagtcccccaactggcacttccctgtctcagacgcccggcgcaggcccaactcaggcccggcagggggttccaaggaaatggggaccagcagcctgggcctggtggacaccacaggaggcccaggcgatgactacggggtgcttgggagcactgccaatgagacagagaagaaatcatccaggcggagaaaggagagttcagacaaccaggagaacagagggaagccggagggcagcagcaaagcccgcaaggagaggacggccttcaccaaggagcagctgcgagagctggaggcagagtttgcccatcataactacctgactcggctccgcagatatgagattgcggtaaacctggacctctctgagcgccaggtcaaagtgtggttccagaaccgaaggatgaagtggaagcgtgtgaagggaggtcagcccatctcccccaatgggcaggaccctgaggatggggactccacagcctctccaagttcagagtgagattctgcatggaggaaaaatgactaaggactgagccccctacccaactacccccaccccaatcccaccttcaccctcttccttccccagccagggcagcctctccacatctttccctgactcttggatatgaaactgcccagcattcctgggagtcttaggattttctaggaagttctgtccagcctcttagcagcctcttccctagggcctttgctcccacactctcatggaatcagacagagatcctaccgggccggatgaatctggaaacagcttcagagatactgcttctcagcgtctcttggctgccacccatgcctcctcctaccgctgttctcctaggtcagccaggcctcctcctggtctggacaccacctggcctggtgggagaggagctttggaaccagctggcgactcggaaagtaaatgcttcaaaaggaaggaaatgacagagacacacgcccttgcccaccttcctctgtaggctgcacatctgaggctttggggccccttagttgtcccgaaaccccaagaaaaatcagaatgaggagagtcaaggacagcaactcagctgctgcaagccagaaacacatccctgtctccaaatttgttggctaagtggagacacttctgagaactgactagagaagacagaaaaatagcccgatgtaggtttcggtgtccccatataggcccgtccacacaggcttgactgggtggacaagaatgaacccatgacagcacctgctgcttcaaaatcaaaatcaatttagggatacagcaggggctgttgggctgtgctccagagaaaaggagcagctactccttttaaatccacgatttctggattgaaaacctgtccagatgctgagttgttgggctgaacaactaggagctgaaaacaacgtagaggctggaaagtgtcccctgcattctggaggggaggggagataataaggagggctgctgggtgagggcctggagatgtggaaccctggagtggaaggttctccagtgacagtgtcctgtgactgcaaaaggggacaagaaaatccctcttcctccatgggatggatttaagctcttgctgtgtgttctacaaatgctgttattgtgggaggaaatgctaggtttttgtgtgtggactgcccagacctcagccaggtcttctggagatgacatttgaggactgatggccaaagagcatgggggactgaagccctggctgcctcagcgctctgtctcccaacaccagctggtgttgcagagggaggtcaacgtgagtttggatctcttgtacgcagatgtaatcattcacatgtaaaaataaccccacctccccaccccaaaaagggcaagagctgtggaaaatgattgccaaatgagatggctggttagagcatgattttttctaaagcatacttcatatattttcttaagattacatcaagctaattgtgcgagctcaattcactttgtaagaaaactctcggagaaataaaatcaataaaaagccaaaaaaaaaaataagaaaaaaaaactcgaggcatctatgtcgg

SEQ ID NO: 8078 - DNA, 987 bp, Homo sapiens
ttttttttttttttttttttttttttttttcaaatcctgtaaataaactgtttattttttatagaaagccacaacagaaaatgattagtatataactaactatgtaagaacacttacatccatacaatcaacagatgcttcaaatgcatattttaaaaatagttttgagtgttaattatgggagggccttgatgggatcattttgtgaacagttcgcttttataacaaactcaagaggcagcttgccagcgagctcttttagacataagcatttttatcaaactgttttgaagggtttgttgttttaaaatcttctccaccatgatactttgtccgagaagacatgacagatgtggccccgttgtatgtgtatctgggtgttttgttgttgtcagatattgaaaagcaaaatatgacaccaccaattatgcacagtgaggctcctgcccatccaataaacagagcggctcctaattcatacttttgctcaacaaagagaggatcaaagaattccgttgtgattttgtttgcatatagggaacatccagtcattgagcacagccctgacagtatgaatacaatcccagccaaacaagcaattttagctttggctttatcggagcctccgactttggtacacttcattccaaagagcgcaaatatggaaccaaagaagcccaggctgacagcagcgatcataagtcctctacatgcctgtatataaccgtccagcgccagcatggaggggaagtccttgcagttggagacgcccgtggagtcggtaacgcacgccttccacaggttggcccaataggtggcggttgtgatgaccgtgccgtcgatggtagacaccttccagtagtcggtgggcagcgtggaggacaccagtacccagcctgagatggagaccatgaaggcgatgatctccgaagccgtgctagccatgcgcgcgctgcagcgcgctcgctctcccccccgctctccgct

SEQ ID NO: 8079 - DNA, 6547 bp, Homo sapiens
  misc_feature (2933)..(2956): n is a, c, g, or t
  misc_feature (3135)..(3155): n is a, c, g, or t
  misc_feature (4833)..(4869): n is a, c, g, or t
gaagccgcccatcccgccccaagtggaggaagagtattacaccatcgccgaattccagacaaccatcccagacggcatcagcttccaggcaggcctgaaggtcgaggtgatcgagaaaaacttgagtggctggtggtacattcagattgaagataaggaagggtgggccccggccaccttcattgacaagtacaagaagacgagcaacgcgtcgagacccaactttctggctcccctgccccacgaggtgacccagctccggctgggggaagcagcagcgctggagaacaacacgggcagcgaagccacgggcccctcccggcccctgcctgacgcaccgcatggtgtcatggactcggggttgccatggtctaaagactggaagggcagtaaggatgtcctgaggaaggcatcttcagacatgtctgcgtcagcaggctacgaggagatctcagaccccgacatggaggagaagcccagcctccctccgcggaaagaatccatcatcaagtcggagggggagctgctggagcgggagcgggagcggcagaggacggagcagctccggggccccactcccaagcctccgggcgtgattttgccgatgatgccagccaaacacatccctccagcccgggacagcaggaggccagagcccaaacctgacaaaagcagactgttccagctgaaaaatgacatggggctggagtgtggccacaaggtcttggccaaggaagtgaagaagcccaacctccggcccatctccaaatccaaaactgacctgccagaggagaagccagatgccactccccagaatcccttcttgaagtccagacctcaggttaggccaaaaccagctccttcccccaaaacggagccacctcagggcgaagaccaagtcgacatctgcaacctcaggagtaagctcaggcctgccaagtcccaagacaagtccttgttggatggggagggcccccaggcagtagggggccaagacgtggccttcagccgaagcttcctcccaggagaggggcctggccgcgcccaggacaggacgggcaaacaggatggtctcagcccaaaagagatttcctgcagagcccctccgaggccagccaagaccacagatcctgtgtctaagagcgtgcctgttcctctccaagaggctccccagcagagacctgtggtcccaccccgcagaccacctcccccaaagaaaacctcttcgtcatccaggccgctcccagaggtcagaggtccacagtgtgaaggccacgaaagcagggcagctcccaccccaggccgtgctctcctcgtccctccaaaagccaaaccttttctctccaactctttggggggccaggatgacacgcgaggcaaaggcagcctggggccatgggggaccggcaagattggagaaaacagggagaaagcagctgcagcctctgtccccaatgccgacggcctgaaggactctttgtatgtggccgtggccgactttgaaggagacaaagacaccagcagcttccaggaagggacagtgtttgaagtccgggagaagaacagcagtggctggtggttctgccaggtcctgagcggagccccttcctgggaagggtggattccttccaactatctcagaaagaagccgtagccgactccctttctgcctagagggcccgctggtccttgctggctttacccacgtatttaatacgcctcttaatttatcattctccacgcagcttccaaggcagacagactctggggtactgtgacttcttgcctcccatgggtggagagtgagtttcggacacctcgggcgcccctgggcctgatccctcctatcacagcatcactggaggctcagaacccacagcctttgctttctgtccatgtcagcatccctgccttaagagaactcctcctggccaatggcattgccacccagcagtgggaccaagactctccaagacctccaggactggatcccattgcctggagaaactccagcaagggtctctcatggcttggacatggcacagtaaggggcagccaacccagtccatgatgacttttgctccaacttcttcatgtttctaaaagcccagtggctttattcactcctcctaaattgcctgctaccagaaggaacttcatcctgaagaaatgcattccattaccagttccagggaaagtgtccccttccccaaagcctcaggcccgtgggcctctgaggttccactggatgcggctcccccaggagtgggcctggagatccgctcagccgccctgcctcccaccttctatcttgggaccgtggtcagccctgaagggtggttccagccccgcgtatgctgcactttgctgctgcaggctccggtccctccagggcttttcaatgagagttcccaccccaacttggagcatttcatttttgcctacctaaagcaagaatctcaaagtttgtttgaataagaggcccattcacaagtcgtgcccttgtgagcacccctttgctgagtgcctcgtgggtgccaaacactgtacttggcgctttgcattcatgctttgaccctcacaacctccctttatagatgaggaaattcacgctccatgtgcccaaggacacaccagccaggaggaagagggaagaggatttgagtccaggcctgcctgacttcagtgcctgtgccctcccctctgtaaaagacaaaccaggcagggaagagatagaagctggctaagtggtggccaagtggcttcattgtgaggggggtgagggggcattcgtggctgctcccacacccaccatccctccagcccacagcagcctataccaaaggctgccccggactcaacagctgcgtctccatgacaggagaatgccagggtcctggtggttggcacagagccctgttccctgcttctannnnnnnnnnnnnnnnnnnnnnnngcttatggagcaacgggagctgaggtggcctcgagggccagcctggagggctctgagcatagcatgcagcggtcccatagggaggcaggtaaccaagggccaggcagagctgcttcctgtgcctctccggcatttgtaatgtttttttcttttttcacgcactgccaaatctgttttcnnnnnnnnnnnnnnnnnnnnnagatgtggtcgtctgtcaaactgaggtctggagaggcatgactaaatcactgcagaagcaaaatcaggacccagcatttctagctcccagcccagagtaagagagcagagcagaaccccttcccattctacccgaccgaggcagccctgccctgccctgccccgcccctccccaccctgccctgccccagagatctccagttcacagtgttcatcaggcgagatacttttggacccacaaagccagttttttggggggatgctcagtgtctacctgcagtgccaaagttttgcttgaacagccctcttctgccgcgcctcccagctccaccccctatcaacgtgggtgctggctgcttctgcgtgaggagcttcctctgatcacctgtagcatctttagtgccttcgtccagtcggcctgcaaatcccatttcccagagaggcttgggcagggcccacttgccacttggccctgtgcccagagcgttgggggcagatggcagccaggggaagaagggaggtggggaagggccgccaccgcttgagggtcccctcccttgagaggaggccccatggcagttttcctgagttcttgatccactttggtttaaacaacttttgtgaagctatgtgagatttgactgcatttcaaaagacaaaacacatgtttttttctgatttgctctttgcctttcagcgacgctttcagatactttgtgagtgtctactctgtgctaggtgctgagtagactgggatgtgtgtggctccatccctggctggaagagctttgagtcctgtctgctgacttcactgaaggagtttctctcttgcttcattccttcctcccgggggtcagctgggtaggagcagacttgccctgccttcctctaggcagaaagttttcctgcaaatgaaagaatctgccattctcttttgctatgatgatgatgattattctgacatgacccgcgggtactgaagccacagtcctctctgttcactgttctctccttgagtcatatctatggcctgaggacgtctgtatccagctccttttcctacaatggtagacacttccccaggcagtgggtgggtcggggtggccagtcactctcctagctgtccttgcctggggacttagatttaccccatccaggactgtggtcgctattctgtgagcgattgatggcgcatatgcagaactcccctggagtcatggctctagaaagtgtccaggcccatcgtgacaatggtgccaagcaccgggctggtgaccagtgcctaaacacacacgctcctttaatccttacggcaagcctgtgaggcggataggaccagccctgatctatagtgagaaaattaaggttcagagggagaaggtccaaatagtggccaagctgggactgagatctcgagtttgggtttgtttgggttttgttgttgttgttctttccctcgtgtccatgacttttctctgccattagcagggaagtgtgcggagggcttccagggaatcaagtgaccctccctctgaatttcggtgcctcttccccccgccccttgctcacacatttcagtaggtcacaggccaaatggcagcccaaaaggtgggcagagatttttttttcttcccctcacccctgcttattaacacaattgtgacaactactttaccttnnnnnnnnnnnnnnnnnnnnnnnnnnnnnnnnnnnnncaaaaatttggaaaaccctgagtctaagaccacctcttgataaaagaggcctttgctcacattttctgctcggaatctttctttgccattggtgggtgtatgtcgtcccagctgagactgcgggagagctgagctccagcttaaaccgcttttaatggcccttccctactgggggatcgctggagcccatgccaggttacggtagtcattttaaacctctgccacaaggccacgccatagaatcaatttccaagtcaatgttcttggccctaaaatgtttgcgcccactgaggatttcattaccaggtggaagatgggggaacatatgccacgttaaagagcaagtgctgagtgtgccaggacttgagaaggaccttaggctgaggagtggacagtctggtatttatttcgcctctcccaagtacccagcacagagtgggaaaaagaagaaactgctcctgccttccagtagctggcaacttgacatcaagaacaaaaacattcgtagctggacccccgtcctttcatcgtgcccaagtcttacatgttggcttaagctgcccccttggaggccgtacctttctctttggactgtgacagtggacacctaacagcctgagccatgtgtggctgtcttatcccccaagggttgtccaggcccgttctgcagggctgttgtgtagaccggcagacatccgatacctcaccacagaccaaagatagacatcgtgtcagactgtgggctgatgagaggtagagcagcatgcatcgaggcctgagggtgcagggcgccctctcttggcctggaggaattgctcctaactagagtaagtttccacgagggtcccaggcagagctgcagagctggaaccggaggctccacagtccttgcctgctcatggacctccttcagagcacctttctacagactggactgcccagctccgtggggtggcatctggtttctggtgctattctgccaagttatcgagctcctcctcatgtttcaacattccatcttcccgtttctatcctcgactccaaagtaagccttcttagctccaatcagggatgaggggctcaacctcttctgtcctcaaagaggccaaacgcagtgccacagtcggtagccttcacttttagatgtcctattcatgtaaaaaagaaggtgcccccaccaggcttacatcagcaataagcaattctaatgcaacgatggtgtccacattttaccccagtgtgtgcccatgtatgcctttgtgcccgtgtaattattgttagcgcccctttcacttagaggggtgatgataaactgtggccaccttgattacaacccacatttcctgctttggggagcttccaagtaacaggccatttcttacctccctccaggaacagtgggcactgcccaccacctcgtgtctgctcataggatgacgctggagatccccacacttactctaccctcttggcaaattggcattccggtggtggtttttgtttcctttaacacattaaataaatgagtatataggatgtgaggggaggggtgagaacaactagctgtagcatgtgtaggctatatactttaccattcgacttctttcctttttttttttaaaataaaaaaagtgcttgactggtttcaagcttcatcatgaaaaaaaaaaaaaaaaaa

SEQ ID NO: 8080 - DNA, 528 bp, Homo sapiens
  misc_feature (526)..(526): n is a, c, g, or t
cattgtcacctcttggcttcatggctatgctgcattaagagatggctaccattgaccctctgcattgccttgcttctggtgctccctctcctgcaagtggccctttttagtcagatccttaaagctatttcaacatttctccacccgtatccccccaccaccctccaccaaatacacatgctttgcactattacagatgttaacttgtcaaagtccagaagctcctgagaagtcagcaggaagacatggtggattgaggcatagccattgacctgaaggaaataattaaaatgcaggagggttgctgtgagggacacactaacttagtacatctttctctgatgaaatctgtcaggctcttagtttaccaaatgtgggaacttttgtgcttgttttgctcttaggcacaggataggtcccaggagagattccattcattcctccaaagagaaacagaagaaaaaagaatgaagtctcactaatagcttggttagaagaattgtggttactctgagatctggactcnaa

SEQ ID NO: 8081 - DNA, 1661 bp, Homo sapiens
  misc_feature (1324)..(1326): n is a, c, g, or t
  misc_feature (1328)..(1328): n is a, c, g, or t
  misc_feature (1330)..(1330): n is a, c, g, or t
  misc_feature (1333)..(1334): n is a, c, g, or t
  misc_feature (1355)..(1355): n is a, c, g, or t
  misc_feature (1359)..(1359): n is a, c, g, or t
  misc_feature (1363)..(1363): n is a, c, g, or t
  misc_feature (1370)..(1371): n is a, c, g, or t
  misc_feature (1373)..(1378): n is a, c, g, or t
  misc_feature (1381)..(1382): n is a, c, g, or t
  misc_feature (1389)..(1391): n is a, c, g, or t
  misc_feature (1393)..(1394): n is a, c, g, or t
  misc_feature (1397)..(1397): n is a, c, g, or t
  misc_feature (1415)..(1423): n is a, c, g, or t
gcttgaggggggaccctggtcctgctggcccccctggacacatgggaccaccgggctttaaggggaaaacaggacatcctggcctcccaggacctaagggtgactgtggcaaaccaggtccccctggcagcactggccggcctggcgcaaaagggtgaacctggtgccatgggaccccagggaagacccggtcccccgggacacgttgggccaccagggcctccaggccagccaggaccagctgggatctctgcagtgggtctgaaaggagaccgaggagccaccggagaaaaggggccttgcaggcctcccaggccagcccggcccccctggacaccctggccccccaggcgaacctggtacggatggtgcagctggcaaagagggaccccctggaaagcagggattctatggacctcctggtcccaagggtgatccaggagctgcaggacagaagggccaggcaggagagaaggggagagccggcatgcctggtggacctggcaagagtggttccatggggcctgttgggccaccgggccctgcaggagagagaggccaccctggagctccggggccttcggggagccctggcttgcctggtgtgcctggctccatgggagacatggtgaattatgatgaaatcaagaggttcatcagacaagagatcattaaaatgtttgatgagagaatggcttactacacctccaggatgcagttccccatggagatggcggcagctccgggacgaccagggcctccagggaaggatggtgctccgggcaggccaggtgctccagggttcacttgggctccctggtcagattggcagagaaggacggcagggcttgccaggagtaagaggattgcctggtaccaaaggtgaaaaaggggacattggtattggcattgcaggagaaaatggtcttcccggccccccaggtcctcaaggtcctccaggctatggcaagatgggtgcaacaggaccaatgggccagcaaggcatccctggcatccctgggcccccgggtcccatgggccagccaggcaaggctggccactgtaatccctctgactgctttggggccatgccgatggagcagcagtacccacccatgaaaaccatgaaggggccttttggctgaaattccccacctgcctttggatgaaagactccgttgggaataaatggccaaagcttataggactctgtgacaggttgtgaatgtttttttttttgttgttgttgtttttaattgctgttaatattttttaaataataaagaaacaaaactaaaaaaaaaaaaaaaaaaaaattaataannnananaannaaaaaaaaaaaaaaaaaaaanaaanaaanaaaaaannannnnnnaannaaaaaannnannaanaaaaaaaaaattataaannnnnnnnnaaaaaagggggggccccaaaaaaaccccccgcgggggcgccccattaatttacgccccccttttttttttagaaaggagggggcctctgggggggttgtatgtttaaccccgggggggggcggcgctgtttctataccggagtggggcggggaaaacacccccccccgttggctcttctcgagcgcaatacttttttctagtggggggcgggcgattgagacaacaccttccctgtaa

SEQ ID NO: 8082 - DNA, 3607 bp, Homo sapiens
  misc_feature (679)..(700): n is a, c, g, or t
  misc_feature (2238)..(2252): n is a, c, g, or t
  misc_feature (3506)..(3508): n is a, c, g, or t
  misc_feature (3514)..(3515): n is a, c, g, or t
  misc_feature (3520)..(3521): n is a, c, g, or t
  misc_feature (3545)..(3547): n is a, c, g, or t
tcaggtaagaccgacagccccggaagggtcttccattccgaggaggcgcgcgcaggccggggagggggagttggtgcctggtgcagctccccaagggagaattttttttttttttttgacagcgcagagaaatctcactggggactggggcagtaggatcgatcccaatcccgaggaaaaccagagaagtagctgggggagacggtgccacattgtgagattcccagagtgaaatgtataggcccagggaaaagtgtcttcgcggccccgagacgcggggaggctctagactttcctgtggtgggcacagctgctgaatcccggggaccggcgcggagccaatgtgcgctaacccctgccctccctcctgtcctccatcccccagcacgcgcagcatcccacggcggctgttactcagtgcacccggctcgggggaaggcgggggacctcgccgtgggaaagggggcgggggccgcgcgggggaggaaccaggatggagcctgggaagccgaggcgccgggtcccagagcggaggagggggagcgtggcccccgagcccggacagactggcttattgtggtgttccgcttctggttgcagactcttgcaagctggatgccctctgtggatgaaagatgtatcatggaatgaacccgagcaatggagatggatttctagnnnnnnnnnnnnnnnnnnnnnnacctcagtccccccagagactcttggccgtgatcctgtggtttcagctggcgctgtgcttcggccctgcacagctcacgggcgggttcgatgaccttcaagtgtgtgctgaccccggcattcccgagaatggcttcaggacccccagcggaggggttttctttgaaggctctgtagcccgatttcactgccaagacggattcaagctgaagggcgctacaaagagactgtgtttgaagcattttaatggaaccctaggcttgatcccaagtgataattccatctgtgtgcaagaagattgccgtatccctcaaatcgaagatgctgagattcataacaagacatatagacatggagagaagctaatcatcacttgtcatgaaggattcaagatccggtaccccgacctacacaatatggtttcattatgtcgcgatgatggaacgtggaataatctgcccatctgtcaaggctgcctgagacctctagcctcttctaatggctatgtaaacatctctgagctccagacctccttcccggtggggactgtgatctcctatcgctgctttcccggatttaaacttgatgggtctgcgtatcttgagtgcttacaaaaccttatctggtcgtccagcccaccccggtgccttgctctggaagtctgtccactacctccaatggtgagtcacggagatttcgtctgccacccgcggccttgtgagcgctacaaccacggaactgtggtggagttttactgcgatcctggctacagcctcaccagcgactacaagtacatcacctgccagtatggagagtggtttccttcttatcaagtctactgcatcaaatcagagcaaacgtggcccagcacccatgagaccctcctgaccacgtggaagattgtggcgttcacggcaaccagtgtgctgctggtgctgctgctcgtcatcctggccaggatgttccagaccaagttcaaggcccactttccccccagggggcctccccggagttccagcagtgaccctgactttgtggtggtagacggcgtgcccgtcatgctcccgtcctatgacgaagctgtgagtggcggcttgagtgccttaggccccgggtacatggcctctgtgggccagggctgccccttacccgtggacgaccagagccccccagcataccccggctcaggggacacggacacaggcccaggggagtcagaaacctgtgacagcgtctcaggctcttctgagctgctccaaagtctgtattcacctcccaggtgccaagagagcacccaccctgcttcggacaaccctgacataattgccagcacggcagaggaggtggcatccaccagcccaggcatcgacattgcagatgagattcctctaatggaagaagatccctaatatgggtcaagatccagatgactctcctgctccttcggggaaaggaccttgtatcttggagtgaggtcacagaaggatagagcctgggggcaaaatgtctaacttgtctacatggggaccacagttcacnnnnnnnnnnnnnnnctccacagtgaggctgacaaactgcaatggcagtgcttttaaatgagatttgaggattcaccaagacccatggggaaccggggcagcagggaagccctcgcgtggtcttggatgaggggtgttaaatgtgtatcgtgctgtggaacatgggacaattccacgcacatcccaccgaatcatcacgcatcccattgactggcaagtactccccgccccctctgaaagcatgtcacatcatgtaaatttgcttctaacatctgcttcaaactgtctctggactccaaatttggatgggtcagcctctgcagaaagtttgtgttgagatgctggaagaacagcagagcctcctgcaccctcagcaagggaccagctcccaaaggaaaggtccttgtgtgacatttggagaatcttccttcatccagacaactctactcgaagcaagacgaaagcaggatgtggcagttgcagtgagaaaggaaaggaaagatgggcagactctgctttctggaaatttcttcacaaagtagagctcatgaactctgtgctgtcttctggtaacatatcatcagtgtttgtattcatggtgtggcacatggatccatggcattgggtaaatctggtggtttttacacatggtcagaatgtgttcaaatacatctcatgatggagacagtaaccaaggtaatgttttgtttcagcattttaaaaagactccacttaacatttatctcagaatcatgagcctctctctagttgacaattgtcattgttcccccagccccaaattgaaccatacatttattttccaaaacagaaattgtttctgtaaacatatccgaccttcaaaagaagtgtgaggttggatttttcccccttttatttgtcctaagattccaggaggctggcctcccagcccagatagctcagccacctcacctgcctatcattcctgcattcctactttgagggtctcatcatgcccactgggtgttgttcctaagaaactgattgattaaaaaatttcccaaagtgtcctgaagtgtctcttcaaatacatgttgatctgtggagttgattcctttccttctcttggttttagacaaatgtaaacaaagctctgatccttaaaattgctatgctgatagagtggtgagggctggaagcttgatcaagtcctgtttcttcttgacacagactgattaaaaattaaaagaaaatgaaaaaaaaaaaaaacaacaagggcgggggccgctnnnctaganngtatnnccaaacagaggggggcccccaagnnncttacgggcggtacccccagccttttcttggtacaaccacgtgggtcccctataagtgag

SEQ ID NO: 8083 - DNA, 1594 bp, Homo sapiens
tttttttttttttttttggagattttaaagattttcttttttttgacatagaatcttatggaggctgagaaataattttttttctattttattcttcagccccaggtgtttgcttttgcagattcttgagcacattgagagcctccaaggcatggagtggggtgcctgaagtttcagtgattatagggagttgagagactcaactgggaaaggaaaggtctaaaaggaggcaatttggaagataaaaattttctcaaaggagccattaaagttgtaaataattcttagtaaagtcatgcaaacaggaaaagaagtagaattagttccatattgggtggaacacatagtcagcagaggtttgagaagggagaatttagtgaactgagaagttctcatgaaaggagcaagttgaagatcacagagacaccttgaaacaaaaagccaggaataacttccaacccaagaggagaacagagaggcctcaaaaccaaagctaggataagaaacttgtagcccaagagttatcttccagacaaagaagcctgagattccaacgcagcttcagagagtactcactcaaaatgttactgaaactgaaggctttttaatgacttagccatgcctgcaaaaggcattccctaaggtggcacagaagacggagcccccatatccaaagatagccaaggagaaagaaagacccctgttgccagagccagtgggcaaaggcaacagaaaaggagacaagggtcctaatgggatgagatcctttcggatttaggcttttatacaaactcctgagaactggcaggttgacagccataaatggggtaccaacatttctactcattggattacaagttctcaggcatccagaatgattaacaaaatgacaatttctagggcttctgtgggagagtatggaaaggtctttttgaaccttttaatgctgtcaacggaagaatgatgaggttcataaatttggaaaggagacatttcttcatttttatgtttatttttatttttttttgagacagagtttcactcttgttgcccaggctggagtgcaatggcgtgatcttgggctcactgcaacctccacctcctggggttcaagcgattctcctgcctcagcctcctgattaactggggattacagatgccccaccaccccacctgggctaatttttttggcggtttttggtaaaagacggggtttccttccatgtttggccaagggttgggcctggaaacttcctggagcttcggggggatcccactttggccttcgggccttcccaaagaggggctgtgggatttggccgggcatgtgaacccaccccacccccccatgggagaaagaattttattttatccctagataaaaagggggttggtaaccctgcagagggttgtccccttttttggacagggtctggggaaaaaatatagccctccgcggcccgaaagccgcaaaaaacggagcctttttaacgggggggggggtcaaggggaaaatccccatctttttgtctgggcgggaaatggggcccaactacctctttttttaaataaagccgccgcggaggaggcgctt

SEQ ID NO: 8084 - DNA, 2513 bp, Homo sapiens
  misc_feature (1826)..(1840): n is a, c, g, or t
agtaattagagctaagcggcaattacaggacgtatgatttgttcagaagcactgcctgccggctgtttcctagcaccacatttcacgggagcaccaggttgagatgatggaattatttacttttaaatgtaacatctcgtacagtgctcaaatgcagacgtgaacgtggactgtaaccttaaaaacaaaggcagtacatgccacactactacccttcctgctcttgtgcgcacacctaccctgatgatgcagccttcactggatatcaaaccatttatgtcttttccagtggacagtagttctgctgttgggctctttccaaattttaacacaatggatcctgtgcaaaaagcggttattaaccatacatttggagtatccattcccccaaagaagaaacaagttatttcttgtaatgtctgtcagcttcgctttaactcagatagccaggccgaggcccactacaaaggaagtaaacatgccaagaaggtcaaagcactagacgcaacgaaaaataaacccaaaatggttccttccaaggacagcgcaaaggctaatcccagctgctccatcactccaatcacaggcaacaactctgacaaatcagaagataaagggaagttaaaagccagcagttccagtcagccatcaagctctgaaagtggctcatttctcctcaaatctggcacaacacccccgccacctggagcagccacttctccctccaagagcacaaatggagctcccggtactgttgttgaatcagaagaagaaaaagccaaaaaattactttattgttcactatgcaaagtggctgtgaactccctgtcacagctagaggcacacaacacaggatctaaacacaagaccatggttgaagctcgtaatggggctggtccaattaaatcctatcctagacctggatcaagattaaagatgcagaatggcagtaaggggtcaggactacagaacaagacatttcattgtgaaatctgtgatgttcatgttaattcagaaattcaactcaaacagcacatttctagccgaaggcataaagatcgagttgcagggaaaccactgaagccaaaatacagcccttacaacaaactccagcggagcccgagtattctagcagcaaaacttgcattccagaaagatatgatgaagcctttggccccagccttcctgtcctcacctctcgcagcggcggcagccgtgtcctcagcgctgtcactcccaccccggccctctgcctcgctcttccaggctccagccattcctccagctcttctgaggcctgggcatgggcccatccgcgccactcctgcctccatcctctttgctccgtactaacgtctgcaaaccccaagacgtttgaggccagtaggaagttgagaaagaaagccacaaggattcagcaatttaagcagtttgtgttgcagtacccccattcacccacaaaatgcagcccaccaccctaccgcgttcaatttgtgtatctcagatatttgatttcttgagcatgtattggtcagaaagaaaaagaaagaaaaccattctctatttttccatgggtatgatctggcttaaaacaatatggaatattttcctgacagacttgaaaactaggatcttcctcagatgtctgtaaataactctggtatccaactgggtgtattctagtgtggaacaaaaaacagtgaacacaagtgcttacttgtggatactatcttaccaacggatcacaaagttctctttttggtgtactgttgttgacagggattgtgtactgtttcgacccaagtactgctgtatcctgtgtagtnnnnnnnnnnnnnnncttgtctgaattaaacatttttagttgctgtgtaaatgttaggaagcaaagtagctttgaattttctctgtaagagaataaaagataaaataatgtattttctttatttcacattttatttggagatatttaaatgaaatagaaagccatataacatagctataattactacctgtttgctatttttgtttaacttattttgtagcttcctcactggtttgtgttgctaagcaaacgtatacaaacagaaaaagagcttcctaaattgcacatttttgcacctcttgtgcattctgcaagaagacaatgaatccatgtatttctatataagtatcttcttcatttttaacctgttttcatttgtaatgatgctacataattttgtggctccctaatgcaataatgtacagaagataaaaaaatttataattgaacaatttgtctttctgttcgctgaatatattgcaggtcatgctcccatgcccccctttctaagccgatatcaacaagactggaatgtttgtgatatcaggggcaagagttatcatagaacaacaaaatagagtggactcttttagagcatctatatctgcaacctgtaaatggtaaaatgtctgtgtatttttttaaatgtaccttttcaataaaagtacaaaaaataaaaaaaaaaaaa

SEQ ID NO: 8085 - DNA, 4101 bp, Homo sapiens
  misc_feature (19)..(19): n is a, c, g, or t
  misc_feature (851)..(905): n is a, c, g, or t
gagtcttcagacccgcggnccgcaggggagttaaattgctgccgttcctctccttctctcgtgcgttgctgccttgttttctaaaggaacgttttaattcacgtgttttagtatttttctacccgggggcgcgctacccgcctgggtccagactctgctttgtaaacgggttttctatgtatggtatgtgtaggtatactttggacaccttacaacgcttgcgcctctccaacagaggcacgtcttggttattttgggcatcgttcttccccttccacttggtacccccgaacgcagtgtgactaaactccccactgccccttggacgccgatcgccttggggtgcaagtttggggtgcaaacgtctacttcgcaagagggcctgggaccgccccgccccgccccccggccgccagaggttggggaagtttacatctggattttcacacattttgtcgccactgcccagactttgactaaccttgtgagcgccgggttttcgatactgcagcctcctcaaattttagcactgcctccccgcgactgccctttccctggccgcccaggtcctgccctcgccccggcggagcgcaagccggagggcgcagtagaggctggggcctgaggccctcgctgagcagctatggctgcggcgatagccagctccttgatccggcagaagcggcaggcgagggagtccaacagcgaccgagtgtcggcctccaagcgccgctccagccccagcaaagacgggcgctccctgtgcgagaggcacgtcctcggggtgttcagcaaagtgcgcttctgcagcggccgcaagaggccggtgaggcggagaccagaaccccagnnnnnnnnnnnnnnnnnnnnnnnnnnnnnnnnnnnnnnnnnnnnnnnnnnnnnnngatgcacccagatggtaccattgatgggaccaaggacgaaaacagcgactacactctcttcaatctaattcccgtgggcctgcgtgtagtggccatccaaggagtgaaggctagcctctatgtggccatgaatggtgaaggctatctctacagttcagatgttttcactccagaatgcaaattcaaggaatctgtgtttgaaaactactatgtgatctattcttccacactgtaccgccagcaagaatcaggccgagcttggtttctgggactcaataaagaaggtcaaattatgaaggggaacagagtgaagaaaaccaagccctcatcacattttgtaccgaaacctattgaagtgtgtatgtacagagaaccatcgctacatgaaattggagaaaaacaagggcgttcaaggaaaagttctggaacaccaaccatgaatggaggcaaagttgtgaatcaagattcaacatagctgagaactctccccttcttccctctctcatcccttccccttcccttccttcccatttacccatttccttccagtaaatccacccaaggagaggaaaataaaatgacaacgcaagacctagtggctaagattctgcactcaaaatcttcctttgtgtaggacaagaaaattgaaccaaagcttgcttgttgcaatgtggtagaaaattcacgtgcacaaagattagcacacttaaaagcaaaggaaaaaataaatcagaactccataaatattaaactaaactgtattgttattagtagaaggctaattgtaatgaagacattaataaagatgaaataaacttattactttaaaggaaaggatttggagaattgaactcacaaactgatgttatatactcaatagcttaaactcatgataatgctgcgatgtgtggttttgcttgattttgtattttatttgggcatctggaattgacacaccattacattctgtttgcaggattttttttgtaaccatgaaattgaacatttccaaattataaactatgttaatacctataaaatatatagccaggaaccatttatcatcaagaaaagtgtaagaaattatttttgagatgtaatttaagattgttttatgtaaaaggaaaatcttgtatggcatcgaatagccttaatgaatttaattctttcacaaaaatgatttcaaattatcctagagtataacatttttatcaaagatattatttccggagttcttctttctttcttttttttttttttttagtaatttagcaaaaacattactgttctaatgctgaagtgacttttgccagtgccatgtccaggtggtgaggtataagttacttgctcttagcatttggtctgatttttttgctttgtggacacctttgagagtatccacaaagcaatgtctcaggtgtggacacctgagagcatgttttagaaagctttgtaccctgtcttgtggcaggaaagaaagaacaggggttttacataaggaaataagtcctaggaaattagtcaacgcaaattgcatttgcctttgtaccttaccacagtcttatattgttttttaaactctgccatgaaatttggagacatgactgtgaaattcctaacttactatcttacaaagccagtagctaatttgttgctctatgtatgatcctgttacaagtccagtttgcaattcatttgtttcctagaacacagaagggtaccagtaatacactaaatgttcaaggtgtgtagagaaataatatggaattagcagctatgactccaacagacaggattgtgtgagcagctgaaaggagcaaaaaagaactcagtgtaagagaaggcacatacatagttaagaatactaaagtatttttaaaaatcaaggaagaaataaatgttacacaatttgcattggaataaatagatctatttagtcctacaaatcaggagtggtgtagagacatccaaatttaaagaaaaaaaaacacaaaacagaatgttaaaaatgtatgcagatttatggatattatcaatgagaagacatagcatgtaacttctcctatatctctactgtccagcatgtattgttccaaatatgactccctaaaatatatacactttgcagaagctctaggccctcacctcaaaccttgccattggttgccgtatttcaaggtcaatatagtttccctcactttacacaatcattattcttcaatagtggaccatatccttcaccaggtatcctatttctgttatctagaggttagcagaaaatgaaatgaaggaatttccctaagcagttgggaagaacaaattgtatgcatgtaggcaaagattttgaagatacatttgcaagagatatttgtttaaccaaaatatttggaaagtaacaaataaagacatttaaattttctaaaaatggacttgctcttctaggaaaagaatacccctggggcaaaaatataactctagctgtatttcttcttgtcactcttgattcaacttgattataaatacacctgtcactaccagaaccaaaaaaaaaaaaaaaaaaatcccaagcacaaagcttattttatttgaaaaaaataaaaaagaaacttcaacactatgggacgctggctcttttagcatgaaatgacttgagcttttgtagtgatgatacacacacatacacactcatcagtaatacgatggtttcatatattacacaattgatgctaatcataaaaatcagagttacaagttatgatttcatgacaaaatatatttaattaagtttgttatgaaaaaaatagagatatgaatcacttacaaaattcctccattttcagtggctattcatcatttatcatctagactcacatttgtctccttcctgatagcagttaagaaaaaattctaaccacacaatttgtatattgtttttctccgtattatgttaagcaaatgttcactgcagtaaaatgttttggaaattagctttgtcttactttccagtgttagttcagagaattaattggaaacctgatttcttttacacataaacctgacaaaaaatgtagcttagagcaaagggttgaatggttggcttaactccgtgcttacttctcaaggtacttgaaaactttaatagaatatgccagtattcactggagtttttaaaaatattaccatgtgtaaacatata

SEQ ID NO: 8086 - DNA, 1355 bp, Homo sapiens
  misc_feature (287)..(287): n is a, c, g, or t
  misc_feature (296)..(296): n is a, c, g, or t
tggtggagggtgcttgacatttagccccccccacaagagagagagcttctcttacacaaacccccacgacagcggcttccttcgcctccccagtggagcgtacgaagggcgcccggcccccggttttttatagagcgcccttctaagggggccgccttctttttaaaaaaaaatgtgggtcacagcatgacgggcccccctcggcgggttaatttttgagggggcgcccctttcccggggggtttgaggtgagtgggtcccctgggggggccctcttgcggtgtggntttcttaanggggccctttgttttttagtttttttttttttttttttttttttttttttttttttgattataaagcaagtttattctgaagagggattgtcttatgtttacgcacagggaagaaataagaggaaaccctcttttcaacctcttttccccctcacagaaccgagtccccaagttctcagcaacatcatgcagtgcttcagcgcctttactggggaccaaagatgttaggatcgtgaagggtcagactggtcaccagctgttcaaagtcacccaggctccagggtgcaggtgacagattttcggggccaagagatgacctgttgtcaggggggggctgattgaaggtaagcaagagatcagtctggtactggggcagcctcagcaaggcctgatgaagtgtcacgtcctttgctacctgctggttttccttagctatctgctgcttgccagagaggacccaggcttcttgacagcggcccctcaggccaggttctccaaactgagaggctgaacagactccacatggacagccctagccccctgcacgccaccaacatcctcaaagtggtaccgcgcagccgcttcgccccgtacgtgggcctgcagctcgagaagttccactatcaggctctggtccgtcacgggatggcagaaaacttcttgattgtccgggaccggtcggaggtcgcttacgtcaatggcccccatggggaggatggcggaaaaggcgcccccgaacagcgggcagtctctcgtgggctccatgggtctgaggctgggttatgggcattagaaaggtttaaaagaagtccacattgggtcacgtggcatcggctccctgggtttcgcagctgccaccgccacccgggtctggcttagctccccggatcctttaagatttggctccgccctgcgctctcgttggccaatcggcgccaagaccctgggggcgggggtcagcggctttgctccggaagccgcgctcttaggagtgcgcctggcgggacggtggggtctgccttggggttggacttagggttaagggtctatgtcgccccc

SEQ ID NO: 8087 - DNA, 1851 bp, Homo sapiens
ctgacagtgtgatactttttcttgttattgctgatagtattaagcaatatggggttttctaaaacgtaataagtgtatatttagaaaagtttccggatgccggttaaagaatacccttggcagtttatgtgctaagccagccatataatataagagtaataaacttgcagacccaaagaataaaataaattctccaaagcagagagatccgtgtgacccatatattaaaagaaagagaagcaggcagcttaggaaatggaaaattaaaggaagctacaagtccagcttgcctgggagccagcccacagaccagcataacagtggtcttgggagaccaagaacgttcaattcagcaaccacccagaccttgctagcagggaaagaggacagtctttgggatcaggagacccgggttaaaatgtaagttctatacctactggttgttagataacctctctgagcctgtttcttcttctgtaaaatgaggcttatcatgttacctacatcatagggttgttgtgagaataaaatgaggtaggtagtgctggagcatagtaagtgttcaataaagccagtcattcttaggaacagagcagccttgtttggagactagacatttcccattgaagtcaggctaccaagaggcatatttattttccagcaggaaggcagctggggatgggccggttacatccatttgatgttgctagagcatcccagctactcaccacaacccctcctccaatattcacttcataagaacctgtgggaatccctgcaacatttaccaccttctccaaccctggtgacccattcttagacaagcttggctaaataattcccttcctgccatcctcacaaccagtgaggtcaccttgtttgagctgtgttcatttttggagttaatgtcattttgaatcacatttatgaggaaagaagggtgggggtagatgataccattggttggacttcagttgccatatttaaactttcatttccaaacctttcttttgattttacgtttttgtctatgcttattacgtagccttcacagggatccaattgctgggctgaaatttttgagctttgactgaaagaatttggcttttgggtggggcctttacctgtggttgggaaactcagccgtggcattgcagatgggccagtgtttaaggtcagatgtctgtaggtgactgtgctgccatttcatagaatcaaagagagggacatggcttcaagggttgtctggcccaatcccctgctagcaaaaaaaaaaaaaaaaaaaaatgtctcctactgatccctgacaagggaattcaaattcttccagagatgaggagcttgctgttgcacagggtaccttggttcaattaaaaggacagttagggcctacagggaaacccttgtgaggagggggtatatagttgttctgtatcttagtgctggtggtatttatgcagttgtatgctttggtgaaaactcacagaactgtataatagaaagggtgagttctcttgaatgttaattagacctgaattttaaaaatggaaagaaaaaaaaccccagcatttaaaaattgaacaattagcccaacttgttaaaaagaaagtaaggaggctgggtgcggtgactcacgcctgcaatcccagcactttaggaggctgaggcgggcagctcacagggtcaggagatcgagaccatcctggccaacatgataaaaccccatctctactaaaaataggaacccaggaggcagaggttgcagtaagccaagactacgccacttcactccagcctgggtgacacggcgagacgccatctaaaaaaaaaacaaaaacaaaagaaagaaag

SEQ ID NO: 8088 - DNA, 3952 bp, Homo sapiens
  misc_feature (344)..(372): n is a, c, g, or t
  misc_feature (1926)..(1940): n is a, c, g, or t
  misc_feature (3950)..(3950): n is a, c, g, or t
aggcggaacggccggggcgggggcgcaggccggcagccgcaggccggtgcgggatgcgccccgcagccgcgccgcgtgcgcccggcagaggcggccctgcgtgccgtacgctgcgtccggggcgcgcccgccgctattcgggaagctattcagcttcccgggctcattagcagtcgcggtgtgcggctcggcgcgggctcacaaagagctcggcctcgcggactgagccggcggcagcggggcggggacggcggcgtacccgggcagcccagcgccctggccagtctcctgaatatttacgcgttgctgaatctcctgtggacaaaccaccaataggccaggannnnnnnnnnnnnnnnnnnnnnnnnnnnnttcttgtgtctggagattctgaaatttgatcaccaggagatttttcgggacattaccaaaccactcattttagtggctgcctccgggtgatgatggctgtgtgaacgactgccatggcccaccggaagcttgagagcgtggggagcggcatgttggaccatagggtgagaccaggtcctgtccctcacagccaggagcccgagagcgaggacatggagctgcccttggagggctatgtgcccgagggcctggagctggctgccctgcggccagagagccccgcgccagaggaacaggagtgccacaaccacagccccgatggggactccagctctgactacgtgaacaacacctctgaggaggaggactatgacgagggcctccctgaggaggaggagggcatcacctactacatccgctactgccctgaggacgacagctacctagagggcatggactgcaacggggaggagtacctggcccacagtgcacaccctgtggacactgatgagtgccaggaggcggtggaggagtggacggactcggcgggcccgcacccccacggccacgaggctgaaggcagccaggactacccagacggccaactgcccattccggaggatgagccctccgtccttgaggcccatgaccaggaagaagatggtcactactgtgccagcaaagagggctaccaggactactaccccgaggaggccaacgggaacaccggcgcctccccctaccgcctgaggcgtggggatggggacctggaggaccaggaggaggacattgaccagatcgtggcagagatcaagatgagtctgagcatgaccagcatcaccagcgccagtgaggccagccccgagcatgggcctgagccagggcctgaggactctgtagaggcctgcccacccatcaaggccagctgcagccccagcaggcacgaggcgaggcccaagtcgctgaacctccttcccgaggccaagcaccccggagacccccagagaggcttcaagcccaagaccaggaccccagaagagaggctgaagtggccccacgagcaggtttgcaatggtctggagcagccaaggaagcagcagcgctctgatctcaatggacctgttgacaataacaacattccagagacaaagaaggtggcatcatttccaagttttgtggctgttccagggccctgcgaaccagaagacctcatcgacgggatcatctttgctgccaattacctggggtccacccagctgctatcagaacggaacccttccaaaaacatcagaatgatgcaagcgcaggaggccgtcagccgggtcaagaggatgcaaaaggctgctaagatcaagaaaaaagcgaattctgagggggatgcccagacgctgacggaagtggacctcttcatttccacccagaggatcaaggttttaaatgcagacacgcaggaaaccatgatggaccacgccttgcgtaccatctcctacatcgccgacattgggaacattgtagtgctgatggccagacgccgcatgccccggtcagcctctnnnnnnnnnnnnnnnaccacgcccggggcccaggaaggcaagaagcagtataagatgatctgccatgtgttcgagtcggaggatgcccagctcatcgcccagtctatcggccaggccttcagcgtggcctaccaggagttcctgcgagccaatggcatcaaccccgaagacttgagccagaaggaatacagcgacatcatcaacacccaggagatgtacaacgacgacctcatccacttctcaaactcggagaactgcaaggagctgcagctggagaagcacaagggcgagatcctgggcgtggtggtggtggagtcgggctggggctccatcctgcccacggtgatcctggccaacatgatgaatggcggcccggctgcccgctcggggaagctgagcatcggggaccagatcatgtccatcaatggcaccagcctggtggggctgcccctcgccacctgccaaggcatcatcaagggcctgaagaaccagacacaggtgaagctcaacattgtcagctgtcccccggtcaccacggtccttatcaagcggccagacctcaagtaccagctgggcttcagcgtgcagaatggaattatctgcagcctcatgagagggggcattgctgagcgagggggcgtccgtgtgggccaccgcatcatcgagatcaacgggcagagcgtggtggccacagcccacgagaagatagtccaagctctgtccaactcggtcggagagatccacatgaagaccatgcccgccgccatgttcaggctcctcacgggtcaggagaccccgctgtacatctaggccaccccagcctggccacgcagccaggacaccgggcagggccgcccgggcccagaggagctgggagccgggccgcagacttgaccccgacgccacagcccagccacggacgctggctccccaaagggtgtgccctcaccacccacttgatttttttcattttgccaaaaaggggtatgtctttatcaaaggagagtcacagaacaaatgtttgtttgtaaagcgttccaagtattttgccacgttctggactgtcttctccctgcacaagccagggtgtgtctcggtagctgtgcgtggtgtggagtgtgtgtctttcctccctgaagctgtgcggagcgaactggcgcctccgagggacgcggctcccggggcagggcagccgtcacccctgcctcccgcccccttggctgggacgtctggggtcctgtggggcccccacaatggtcccaaacagctgcctctgccactgactgcagggacacgggcagcctggctcccaggacacgacttgtaatgaaagtttggggacatgtgattgattgattgattgattgtaaataaaggatgatggccacaacatgaaaactccatatttatttagatgctattattactgtttggacttttattttggcaggcttttttccagactctagggttttccaatgtgactaatgaccacacctgcctctcccgtcgtctcttctgggcaccctcccacccggctgcatacccggccagggctcccacagagacaaggagggcacaggtgtctgccccctctttaaaatcgatctacacacatccacgcacatgcgaccccgaggaaacgaaacccactctagaaaacgcgaccttggccgcacctaaagcagccagccgtgagtgcagaccccttggccagcgtggcgcagtggccctgagcagtagtggcatgtgtgtagatcaagtcggatctagtccagctcggttcattagcgatccatgtaatctgacgtcatcttgtctcgaagtctctttttttggcccaggccttgaagaatacactgtgacttaagaagccttaccacgcagtaactaaagctttaggatgactgtattcgaggagtgccgtgtgttgcatgcagctacccgtaggaagacttcgcgcatatcactaataaacctgaagtcgtgatgaaaaaaaaaaaaaaaaaaaaaaaaaaaagggcncc

SEQ ID NO: 8089 - DNA, 2305 bp, Homo sapiens
  misc_feature (50)..(50): n is a, c, g, or t
  misc_feature (52)..(52): n is a, c, g, or t
  misc_feature (54)..(54): n is a, c, g, or t
  misc_feature (118)..(118): n is a, c, g, or t
  misc_feature (172)..(172): n is a, c, g, or t
  misc_feature (372)..(418): n is a, c, g, or t
cgctcttctgttctcgctctatttgccccgctgactgctggcctcgcatntntngccagtcttacgtctctgccgcccccactcccgcccgcgccccatcttcttgcgcgactcggcncgctggtccccccctcctcctcccgcgtcctgcctgccccctcctcctgctctngcaggctccttggcacccaggccgggaggagacgcgcccagcgggtctaaacgggaacagccctggctgagggagctgcagcgcagcagagtatctgacggcgccaggttgcgtaggtgcggcacgaggagttttcccggcagcgaggaggtcctgagcagcatggcccggaggagcgccttccctgccgccgcgctctnnnnnnnnnnnnnnnnnnnnnnnnnnnnnnnnnnnnnnnnnnnnnnngggccgccgcaggaggagagcctgtacctatggatcgatgctcaccaggcaagagtactcataggatttgaagaagatatcctgattgtttcagaggggaaaatggcaccttttacacatgatttcagaaaagcgcaacagagaatgccagctattcctgtcaatatccattccatgaattttacctggcaagctgcagggcaggcagaatacttctatgaattcctgtccttgcgctccctggataaaggcatcatggcagatccaaccgtcaatgtccctctgctgggaacagtgcctcacaaggcatcagttgttcaagttggtttcccatgtcttggaaaacaggatggggtggcagcatttgaagtggatgtgattgttatgaattctgaaggcaacaccattctccaaacacctcaaaatgctatcttctttaaaacatgtctacaagctgagtgcccaggcgggtgccgaaatggaggcttttgtaatgaaagacgcatctgcgagtgtcctgatgggttccacggacctcactgtgagaaagccctttgtaccccacgatgtatgaatggtggactttgtgtgactcctggtttctgcatctgcccacctggattctatggagtgaactgtgacaaagcaaactgctcaaccacctgctttaatggagggacctgtttctaccctggaaaatgtatttgccctccaggactagagggagagcagtgtgaaatcagcaaatgcccacaaccctgtcgaaatggaggtaaatgcattggtaaaagcaaatgtaagtgttccaaaggttaccagggagacctctgttcaaagcctgtctgcgagcctggctgtggtgcacatggaacctgccatgaacccaacaaatgccaatgtcaagaaggttggcatggaagacactgcaataaaaggtacgaagccagcctcatacatgccctgaggccagcaggcgcccagctcaggcagcacacgccttcacttaaaaaggccgaggagcggcgggatccacctgaatccaattacatctggtgaactccgacatctgaaacgttttaagttacaccaagttcatagcctttgttaacctttcatgtgttgaatgttcaaataatgttcattacacttaagaatactggcctgaattttattagcttcattataaatcactgagctgatatttactcttccttttaagttttctaagtacgtctgtagcatgatggtatagattttcttgtttcagtgctttgggacagattttatattatgtcaattgatcaggttaaaattttcagtgtgtagttggcagatattttcaaaattacaatgcatttatggtgtctgggggcaggggaacatcagaaaggttaaattgggcaaaaatgcgtaagtcacaagaatttggatggtgcagttaatgttgaagttacagcatttcagattttattgtcagatatttagatgtttgttacatttttaaaaattgctcttaatttttaaactctcaatacaatatattttgaccttaccattattccagagattcagtattaaaaaaaaaaaaaattacactgtggtagtggcatttaaacaatataatatattctaaacacaatgaaatagggaatataatgtatgaactttttgcattggcttgaagcaatataatatattgtaaacaaaacacagctcttacctaataaacattttatactgtttgtatgtataaaataaaggtgctgctttagttttcaaaaaaaaaaaaaaaaaaaaaaaaaaaaaaaaaaaaaaaaaaaaaaaaaaaaaaaaaaaaaaaaaaaaaaaaaaaaaaaaaaaaaaaaaaaaaaaaaaaaaaaaaaaaaa

SEQ ID NO: 8090 - DNA, 388 bp, Homo sapiens
gcggccgctactcgtgcatgcagtgcgccttctccacggcctcgcggcccgccatgaccctgcacctggaggaccaccgccccggcgcccccgcggcccccgcggccgggccgccgcgccccgacgcccccgcgggtaaggccgaggaatgcgcgggtggagaggggggcgggggcccaaggcgctgaggctcaggcgcccccctcctctgccccacccagatccggccccgcttgcacccaaggtgtcgccgctgctgtcagagggggagcttccagtgttctcgcagctctgaatcccgccgctttgggggtgggccatgggatgtgggtagttttgtcatttggagggggctgcagggaaggggggctggggtggacaataaaga

SEQ ID NO: 8091 - DNA, 814 bp, Homo sapiens
  misc_feature (728)..(729): n is a, c, g, or t
  misc_feature (732)..(732): n is a, c, g, or t
  misc_feature (734)..(734): n is a, c, g, or t
  misc_feature (739)..(741): n is a, c, g, or t
  misc_feature (747)..(749): n is a, c, g, or t
aggcgtgagccacgcgcccggccaaggcccggttttagaggcactaagtcttcctccaccctgccctttacactttgaagcctatactgtatatgtcgatagggttagagaatccattccaggctcggggacccagaggcctggctgcagctgggcctggctctcactgcatccctcctggcacaggtactggtgtggcatactcggacagagaagcccaagatgaagcaggaggagcagctgcagcggcagggccggggctcagacccagcaattgaggtgtgatggcggccccaccccaactaccacctcttttcaggcacagaccttgtgggactgggccccaggcctgcccaggatgtggttttccaagtcctgacccttggagccagaagtggcccctctgcccctccaggcccagggcatggtcctgctgcttcacccctcccctagcctgccgtgtggcactgcccacaggctggggacaagcagcccttgtgttgagtcaggttggccctgtctagggtggaacagaaggacagatggacccaggagggagggcagctgagtaactgggtaacttattggggctgggcatgcactggggggctggaggagctgggctggacccttcccacctgagcatgctgacccccttcctacctccagaataaagaatctcaacctggaaaaaaaaaaaaaaaaaaaaaaaaaaaaaaaaaaaaaannaananaaaannnaaagannnaaaccttcgggggggggccgggccccaattcgcccctatgggggtcggtatacccgccccccctt

SEQ ID NO: 8092 - DNA, 2679 bp, Homo sapiens
  misc_feature (1431)..(1519): n is a, c, g, or t
atcagcgtagccggtaagcgcctgtctgaacctctgccagtcctggagactggtgccctgagctccaaccagcgggcctcatctacaccctcaccaccgcaacttctcacccgagcaagaagcagctcccagagagaaagaacgttcccacctgcctagccatgggagaggacgctgcacaggccgaaaagttccagcaccctgggtctgacatgcggcaggaaaagccctcgagccccagcccgatgccttcctccacaccaagccccagcctgaacctagggaacacagaggaggccatccgggacaactcacaggtgaacgcagtcacggtgctcacgctcctggacaagctggtgaacatgctagacgctgtgcaggagaaccagcacaagatggagcagcgacagatcagtttggagggctccgtgaagggcatccagaatgacctcaccaagctctccaagtaccaggcctccaccagcaacacggtgagcaagctgctggagaagtcccgcaaggtcagcgcccacacgcgcgcggtcaaagagcgcatggataggcagtgcgcacaggtgaagcggctggagaacaaccacgcccagctcctccgacgcaaccatttcaaagtgctcatcttccaggaggaaaatgagatccctgccagcgtgtttgtgaaacagcccgtttccggtgccgtggaagggaaggaggagcttccggatgaaaacaaatccctggaggaaaccctgcacaccgtggacctctcctcagatgatgatttgccccacgatgaggaggccctggaagacagtgccgaggaaaaggtggaagaaagtagggcagagaaaataaaaagatccagcctgaagaaagtggatagcctcaagaaagcattttctcgccagaacatcgagaaaaagatgaacaagctggggacaaagatcgtatctgtagagaggagagagaagattaagaaatctctcacgtcaaatcaccagaaaatatcctcaggaaaaagctcccccttcaaggtttctcccctcactttcgggcggaagaaagtccgagagggagaaagccatgcagaaaatgagaccaagtcagaagacctgcctagcagtgagcagatgccaaatgaccaggaagaggagtcctttgcagagggtcattccgaagcgtccctcgccagcgctctggtggaaggggaaattgcagaggaggctgctgagaaggcgacctccagggggagtaactcggggatggacagcaacatcgacttgactattgtggaagatgaagaggaggagtcagtggccctggaacaggcacagaaggtacgctatgagggtagctacgcgctaacatccgaggaggcggagcgctccgatggggaccccgtgcagcccgccgtgctccaggtgcaccagnnnnnnnnnnnnnnnnnnnnnnnnnnnnnnnnnnnnnnnnnnnnnnnnnnnnnnnnnnnnnnnnnnnnnnnnnnnnnnnnnnnnnnnnncacatctccagcacgactcacccactcctgcgttcctgtccaggcagtaatcattgaccatatagtcatagtaagacacacgagaccaggctttaccatgaaagcgacctgtcacggactccacttttaatttgctcttaggttctatctctgtagaatgtctccaagattgaagaagaaactgagcagttgaaaaatgctaatctctttgacttagtcagaaaaaaacagaggataattaagatactagtcatgaaaagtgattcattcttttttgtcattccatcaagcttgctgaatagtgtaccggtaatatattgtatttccaccgtactctgtgaatctaattattattctttaagtgttgatatataatatacataaatatgtaagctaaacatataactatatgttttaagaagaaaacatctacgaaaggtaaaaagagatgatcagttggttgtttacttgctagaaaccattgttttattgcaaacgaaggaaaaatgaagagattataaaagtcagctaatgaagtaagatacgtagtaaagtcaggactattcaaaaagtaagaaagaaaatttggaaaatgagagaaacaggaaacaaagaatgccgaaaagaatgaaaacagagaaaaaatgtatgtgcttgaaagtaaaatacttacaatagtagcttaactatttcactctttaaataaaaatactaaagaagttcgtatatcctggaataacaatgtcatcttcaaaatatttttattttctaatatttttaataataacattttatagtgttaaagctgtatttttcttaataaataaaggacattacaatatttctttaaggaagttcaaaggatgtgtctgttaacactggaacgaaatataaatctttcaaatacccattaatatatactgttgttgtggaactttaacctcatactatttctttaatgctcttcaaattttaatataccttaaattcctgtgatgtgatgtagggtttttaagatgccaaatctcttaggtttggggggacaatcaaatttcttggaccaagggaatctcccaaatttttttccttaattcggaataattttcattctaaaagagggttgtattaaatttaaagggaagattgcgcaagaaaagttg

SEQ ID NO: 8093 - DNA, 1641 bp, Homo sapiens
cagcacaaaaccgacgatggagtttgtttctttgatttctttgccaatggcaagaagatgagatgccctcagcactgaggattcttgcccccttgtggtgcccgctgcccccaaccttcaggctgccagatgctcccctgacaacaccaggctacaggagccagacgccagggcctgcccggcctcctgttcctgcccccacccaccacctgcctggagaggtacgggtcgggtccgtgtcggagaagtgacaggtcccagagccaaagccggccctcaagcatcatcagggagtggtgtagttagttgaaggcagttcccaccgagttttccgagcctcagaatccaggagatacgcacagccccacccactctgagatgacagtggctgacttcccgtgctgggcttttccattgtccccctggcctccaggctcctcctctgcctctccatggagtgggtggggaggtggtgggggccggcgtcccctgcgtgtgtgtgtgtgtgtgtgtgtgtgtgtgtggatgtattgacctgtgtttcccaagacagcaggtgccacggcccgccccgcctgccagcccgaattcccgttctcctgtgtctactaacaaggacatgggggtgggcggtgacctccgcatccctcagagctcagagggtcctcgctgccaccggtccccccctagcccgtcatcagccggtggcagctccatcttccattcctggttttagggcagaatccatggagactgcttccagaaggcatctggctctgagttataaattacttccctggtcctgacagtcacctggggtcccccctctccctggttccacctttctgaggaggagcctggagtcagggctgggttttggattaacccatccttcctagttaacacctttttgtttttattttattttatttttgtttgttttctccgtgtgtgtgttttcctaatttatttacctctgtttcccctttttcctttttttttttaattaaagagcaaagctttttattactttgtaatttaaaaaactgaaaaaaaaaaaactgaagaactttggggggaattttgtacttttttcctgtgtaaatattggacttttttgagctttatcgtggttgttaatttgaagtaataaagtagaaaagataaagtgaaaaaaaaaaaaaaaaaaaaaaaaaaaaaaaaaaaaataaaaaaaaaaaaaaaaaaaaaaaaaaaataacaaataaataataataaaacgatatatatgaaaaaccacaaaaaaatactaacatcatattataaactctatctttaaaatgtttaatattcaaaatgtttattgctccggtcttatttaactcacaggatcataattttccaatgtcgcggtctttttaaaataaatgtcgaccttctatttaaaaaccttgtgtgtgtaaaaacctcgtgggttctactaaaatagaagacttaaggtttataaacatactctctcaccttgtggctctcacatatctataatctctcccccatctctcgcttttctcaataggtgttactccatcattttaagtccctgtgtatatattcgctggaataatattttcagacttcgtagtatttgtcgaccttttattc

SEQ ID NO: 8094 - DNA, 2892 bp, Homo sapiens
  misc_feature (466)..(466): n is a, c, g, or t
  misc_feature (469)..(469): n is a, c, g, or t
  misc_feature (2526)..(2553): n is a, c, g, or t
ctggctgccggctgctgccaccgcaatcccggctcctaaatcagcgcggggaggcgctccctccccacgcccggctctccgggctctcggggccgcgattggccgcgccggcgccccccaccccgggcccccggctccagctgccgcgccattggctgcgggcctccgccagcctttacataagaccgggcgcgctcgagtggagttgtataaagcgagcgcgcggcgtcggggcgggaggctcgaggccagcccgggaccggggctgggagcaagcaggcggcggcgccggcggcagaggcggcagcgagcgcccgcttcccacgcccctaggcggcggggccgagagcgggaggatggctccgagcgctgaccccggcatgtccaggatgttaccgttcctgctgctgctctggtttctgcccatcactgaggggtcccagcgggctgaacccatgttcactgnagntactaactcagttctgcctcctgactatgacagtaatcccacccagctcaactatggtgtggcagttactgatgtggaccatgatggggactttgagatcgtcgtggcggggtacaatggacccaacctggttctgaagtatgaccgggcccagaagcggctggtgaacatcgcggtcgatgagcgcagctcaccctactacgcgctgcgggaccggcaggggaacgccatcggggtcacagcctgcgacatcgacggggacggccgggaggagatctacttcctcaacaccaataatgccttctcgggggtggccacgtacaccgacaagttgttcaaagtttccgccaataaccggtgggaagacatcctgagcgatgaggtcaacgtggcccgtggtgtggccagcctctttgccggacgctctgtggcctgtgtggacagaaagggctctggacgctactctatctacattgccaattacgcctacggtaatgtgggccctgatgccctcattgaaatggaccctgaggccagtgacctctcccggggcattctggcgctcagagatgtggctgctgaggctggggtcagcaaatatacagggggccgaggcgtcagcgtgggccccatcctcagcagcagtgcctcggatatcttctgcgacaatgagaatgggcctaacttccttttccacaaccggggcgatggcacctttgtggacgctgcggccagtgctggtgtggacgacccccaccagcatgggcgaggtgtcgccctggctgacttcaaccgtgatggcaaagtggacatcgtctatggcaactggaatggcccccaccgcctctatctgcaaatgagcacccatgggaaggtccgcttccgggacatcgcctcacccaagttctccatgccctcccctgtccgcacggtcatcaccgccgactttgacaatgaccaggagctggagatcttcttcaacaacattgcctaccgcagctcctcagccaaccgcctcttccgcgtcatccgtagagagcacggagaccccctcatcgaggagctcaatcccggcgacgccttggagcctgagggccggggcacagggggtgtggtgaccgacttcgacggagacgggatgctggacctcatcttgtcccatggagagtccatggctcagccgctgtccgtcttccggggcaatcagggcttcaacaacaactggctgcgagtggtgccacgcacccggtttggggcctttgccaggggagctaaggtcgtgctctacaccaagaagagtggggcccacctgaggatcatcgacgggggctcaggctacctgtgtgagatggagcccgtggcacactttggcctggggaaggatgaagccagcagtgtggaggtgacgtggccagatggcaagatggtgagccggaacgtggccagcggggagatgaactcagtgctggagatcctctacccccgggatgaggacacacttcaggacccagccccactggagtgtggccaaggattctcccagcaggaaaatggccattgcatggacaccaatgaatgcatccagttcccattcgtgtgccctcgagacaagcccgtatgtgtcaacacctatggaagctacaggtgccggaccaacaagaagtgcagtcggggctacgagcccaacgaggatggcacagcctgcgtggggactctcggccagtcaccgggcccccgccccaccacccccaccgctgctgctgccactgccgctgctgctgccgctgctggagctgccactgctgcaccggtcctcgtagatggagatctcaatctggggtcggtggttaaggagagctgcgagcccagctgctgagcaggggtgggacatgaaccagcggatggagtccagcaggggagtgggaaagtgggcttgtgctgctgcctagacagtagggatgtaaaggcctgggagctagaccctccccaagcccatccatgcacattacttagctaacaattagggagactcgtaaggccaggccctgtgctgggtnnnnnnnnnnnnnnnnnnnnnnnnnnnncgctgccctgatggcgcttacattccagtgggtctaatgaccatatcttaggacacagatgtgcccagggaggtggtgtcactgcacaggaagtatgaggactttagtgtcctgagttcaaatcctgattcaggaactcacaaagctatgtgaccttacaccagtcacttaacttgttagccatccattatcgcatctgcaaaatggggattaagaatagaatcttggggttagtgtggagattagattaaatgtatgtaagacacttggcacaaaacctggcacatagtaaaggctcaataaaaacaagtgcctctcactgggctttgtcaacacgtg

SEQ ID NO: 8095 - DNA, 4364 bp, Homo sapiens
  misc_feature (2495)..(2509): n is a, c, g, or t
gcggccgcggtgaagcgcggagggcggcgcgggcaccggggccgggccggggctgcagccgcagcggccatgggggccctgacgagccggcagcacgcgggcgtggaggaggtggacatcccgtctaattccgtgtaccgctacccgcccaagtccggaagctattttgccagccacttcattatgggaggagagaagtttgactcaactcatcctgaaggttacctgtttggagagaacagcgatctgaactttctggggaacagaccagttgtgtttccttacgccgccccacctccccaagaacccgtgaagactctgagaagcctggtcaatatccgaaaggacacactgaggctcgtcaaatgtgctgaggaagtgaagagccctggagaagaggccagtaaagctaaagtccactataatgttgagttcacctttgacacagatgctcgggtagccatcaccatctattaccaggccacggaagagttccagaatggtattgccagctacattcccaaagacaacagcctccagtcggagactgtgcagtacaagcgaggagtgtgtcagcagttctgcctgccctcccacaccgtggatccctccgagtgggccgaagaggagcttggctttgatttagaccgagaagtttaccctctagtggtacatgccgtggtggatgaaggagacgagtattttggccattgccatgtactgctgggtacttttgagaagcacacagatggaactttctgtgtcaagcccctcaaacagaaacaagtagtagacggggtcagctacctccttcaggagatctatggaattgaaaacaagtacaacacacaagattctaaggtggctgaagacgaagtgagtgataacagtgccgagtgtgtggtgtgtctctcggatgtccgggacaccttgattctgccctgtcgccacctctgcctctgtaacacctgtgcagacacgctgcgctaccaggccaacaactgccccatctgccgactgcccttccgggcactgcttcagatccgagccatgaggaaaaaattgggccccttgtccccaaccagctttaaccccatcatctcatcccagacatctgactctgaagagcatccatcctcagagaatattccaccaggctatgaagtagtatctcttctggaggccctcaacgggcccctcaccccgtccccagcagttcctccacttcacgtgcttggagatggccacctctcaggaatgctcccttcatatggcagtgatggccacctgccccccgtcaggacgatctcgcctcttgaccgcctgtctgacagcagcagtcagggactcaaactcaaaaagagtctctccaaatccacttcccaaaactcttccgtgctgcatgaagaggaagatgagcattcctgcagcgagtcggagacacagctctctcagagaccgtcggttcagcatctcggagaggaatgtggtgtgactccagaaagtgagaatctcaccctgtcgtcatctggagctattgaccagtcgtcttgcacagggacgcctctgtcatccactatttcctccccagaaggccctgccagcagcagcttggcccagtctgtcatgtccatggcatcctcccagatcagcactgacaccgtctcctccatgtctggctcctacatcgcccctggcactgaagaggagggagaggctctctcttccccccagcctgccagcagggccccctcagaagaaggagaggggctgccagcggagtctccagacagcaactttgctggcctcccagctggagagcaggatgcagagggaaatgatgttatagaggaagaggatggatcacccacgcaggaaggccagaggacgtgcgcatttctaggtatggagtgtgacaataacaatgactttgacatcgcaagcgtgaaagcactggacaataagctgtgctctgaggtctgcttacctggtgcctggcaggctgatgacaatgccgtcagtcggaatgcccagcgccggcgcttgtcatccagcagcctggaggactctgagacgaggccctgtgtgtggggccctttggctgtctgagccccagcctctgcacttgggctcccctcctgccctgcattccatccatcctcactcagctgctgcctactgggcatcctcagcaagatgctggagactttttaccctcctgtgacagctgttacaacctgtaaccacaatccctcacctctcagagggaactggaaccctcctttctccgtgtgacctaaagccactcaatgaactgcagctcacgagaccttttgcagggactctggaatgtcctcacggtatattgatgttcaggtggagctggggtccatgggctaatttcttacacatcttttttctccttagggggtagaacaagaaggcttagagtttggcagctttgttacaaacatccctctggcatttcctggtcnnnnnnnnnnnnnnnccaattggaaacctgcagtttggggtagggctggaggatcgctcctgtggaaagggagagccatactgcacggacgtagcgtttccctctacaagcactaggagcacctttctcaaggacaagaaatggtagcaaccaaaaggttggttgaaggaaacaatccttccttctggtggcagagccagtcttctgggcctcacatgcctgtgcggttaagaaggagctcttggccgggcgcggtggctcacgcctgtaatctcagcactttgggaggccgaggcgggtggatcatgagatcaggagatcgagaccatcctggctaacacggcgaaaccccgtctctactaaaaatacaaaaaattagctgggcatggttgcaggcgcctgtagtcccagctacttgggaggctgaggcaggagaatggcctgaacccgggaggcggagcttgcagtgagccgagatcgcgccaatgcactccagcctgggcgacagagaaaaaaaaaaaaaaagaaggagcccttgaatctgagaatcccccagttaagatgatttcccttaaggagcatttctcctgatcaggtgcattcagggaggcctgcaactccatcctaaggtgacatttcaagaaacacatgtgttgaccacctctgtgtgccaagcactgggtgaggagtggtcgtatattaccataattcatcctcactcaattgggaggtggcattcttgtccctgttgcccccatctctacccccttttgttaatggttgagagaaatgtggaccagtgattctcagtttggtgcccaggtccccaaaggaagtgatggagagccttgagctaagttcaggcagcagcatgtggccagcagcagtgtgctgggagcagaggttggaatcagggctcagggccttcacttcaagggccctccccagctactcgggaggctgaggcaggagaatcgcttgaactcaggaggtggaggttgcggtgagccaagatcgtgccactgcactccagcctgggctacaagattgaaaagatcgaaactctgtctcaaacaaaaaaaaaaaaattcaaggctgtttccaaggcagcctcaaaaagagcctggtgcccagggggtccttcgtttctgtgtggctgcagaggccaggagtgcagtgactgtctcactgcctagtggttgtggctcacatcctgccctgatggagaggggggcctgtcgtccaaccctctctgaaaaactgcagtagactttaccatttcaggcccccacctaatgttctttcctttctttccccctacattctttcccgcccctttttataagttaagatgcataagctgagccaataacccccactttcctgattttcccctggaaatattgagccccagaagaccagcaaggggtgaacagggagcttcccttaccctggggtggtggcacacagaccactcctgtctgtcccctgcaggtagtattcacagtgtggtgtaacctgggaggagggaggaaggaagctgaattaacgaattcaggaaacagtagcacagtggccaggaacccattctaaggatcctgtcttcgtcgcagaggggctaagtctctcctaggagagcgggaagatcctcagcctaaggccaggtcaggctccctggtaaaatgcctatgtctaggtaatatgccataacaacctggtattgggggcagagacgcgccgaatcaccaagacggccttagcgatcgaagcgcacctaatgagctggaagatacgccgccgagacgcgttggacataccacctgaacatagagggcagacccccacctgacagcgcacgagagaaaggccc

SEQ ID NO: 8096 - DNA, 4898 bp, Homo sapiens
agcaatgatttcctcagtgattacgtacagagcgagtccctgcgggttaggggccccctctggagccatcctgatggctttgggggccttgcttccattttccattattatgtggactaccggagcgacagcgcagtccaagaccttgcaggatgtctcgccgcaagcaagcgaaaccgagatccctcaaagaccccaactgtaaacttgaagacaagactgaagatggagaggcactagattgtaagaagaggccggaagacggggaggagttggaagacgaagctgtgcacagctgtgacagctgcctccaggtgtttgaatcgctgagcgatatcacagaacacaagattaatcaatgtcaactgacagatggagtggatgttgaagatgatccgacttgctcttggccagcttcctcaccttctagcaaggatcagacttcccctagccatggagaaggttgcgattttggagaggaagaaggtggccctgggcttccatacccgtgtcaattctgtgacaagtcgtttagccgcctcagctacctaaagcaccatgagcagagtcacagtgacaaactgcctttcaaatgcacctactgcagtaggctgttcaaacacaagcgcagccgagatcgccacataaaactccacaccggggacaagaagtaccactgcagtgaatgtgatgctgcgttttccagaagtgatcacttgaagatccacttaaagactcacacgtccaacaagccatataaatgtgccatttgtcgccgtgggtttctgtcctctagttccttacacggacacatgcaggttcatgagaggaacaaggacggctctcagtccggttccaggatggaggactggaagatgaaggacactcagaagtgcagtcagtgtgaggaaggctttgacttcccggaagacctccaaaaacacattgcagagtgccaccccgaatgctccccaaatgaggaccgagcggccctccagtgtgtctactgccacgagctcttcgtagaggagacctccctcatgaaccacatggagcaggtgcatagcggggagaagaagaactcatgcagcatttgttctgagagtttccacacagttgaggaactgtacagccacatggacagtcaccagcaaccggagtcatgcaatcacagcaacagcccttccctggtcacggtgggctatacctccgtgtccagtacgactccagattccaacctctcagtggacagctcaaccatggtggaagctgccccgccaatcccaaagagtcgagggaggaagagggccgctcaacaaacccctgacatgactggtccctcgagtaaacaagcaaaagttacctacagctgtatttactgcaacaaacaattattttcaagtcttgcagttctgcagattcacctgaaaactatgcacttagataagccagaacaggcccatatttgtcagtattgcttggaggtcctgccctcactctataacctaaatgaacatcttaagcaagtgcatgaagctcaggacccaggtctgattgtttctgccatgcctgccattgtctaccagtgtaacttctgttccgaagttgtcaacgacctcaacactcttcaggaacacatccgatgttctcatggatttgcaaaccctgcagctaaagatagtaatgcattcttttgtccccattgctatatggggtttctcactgactcttccctggaagagcatattagacaggttcattgtgacctcagtggctcccgatttgggtctccagtgcttgggactcccaaagaaccagtagtagaagtctattcttgttcctattgtacaaattcgccaatattcaacagcgttcttaaactgaacaagcatatcaaagagaatcataaaaacattcccttggccctgaattatatccacaatgggaagaaatccagggccttaagccccctatctcctgtggccatagagcagacatctcttaagatgatgcaggcagtaggaggtgcacctgcacgtcccactggagaatatatctgtaatcaatgtggtgctaagtacacatccctagacagctttcagactcacctaaaaactcatctcgacactgtgcttccaaaattgacctgtcctcagtgcaacaaggaattccccaaccaagaatccttgctgaagcatgttaccattcactttatgatcacttcaacgtattacatctgtgagagttgtgacaagcaattcacatcagtggatgaccttcagaaacacctgctggacatgcacacctttgtcttctttcgctgcaccctctgccaggaagtttttgactcaaaagtctccattcagctccacttggctgtgaagcacagtaacgaaaagaaagtctataggtgcacatcttgcaactgggacttccgcaacgaaactgacttgcagctccatgtgaaacacaaccacctggaaaaccaagggaaagtgcataagtgcattttctgcggtgagtcctttggcaccgaggtggagctgcaatgccacatcaccactcacagtaagaagtacaactgcaagttctgtagcaaagccttccatgcgatcattttgttagaaaaacacttgcgagaaaaacactgtgtattcgaaaccaagacacccaactgtggaacaaatggagcttccgagcaagtgcagaaagaggaagtggagctgcagactttgctgaccaacagccaggagtcccacaacagtcacgatgggagcgaagaagacgttgacacctctgagcctatgtacggctgcgacatttgtggggcagcctacactatggaaactttgctgcagaatcaccagctccgagaccacaacatcagacctggagaaagtgccatcgtgaaaaagaaagctgagctcattaaagggaattacaagtgcaacgtgtgctctcgaaccttcttctccgaaaatggcctccgggaacatatgcagacccacctaggccctgtcaaacactacatgtgccctatttgcggagagcggtttccctcccttttaactcttactgaacacaaagtcacgcatagtaagagtcttgatactggaaactgccggatttgcaagatgcctctccagagtgaagaggagtttttagagcattgccaaatgcaccctgacttgaggaattccctgacaggctttcgctgcgtggtgtgcatgcagacagtgacctccaccttggaactcaaaatccatgggacgttccacatgcaaaagacagggaatgggtctgcagttcagaccacagggcggggccagcacgtccaaaaactgtataagtgcgcatcttgcctcaaagaattccgttccaagcaagatctggtgaaacttgatatcaatggcctgccatatggtctgtgtgccggctgcgtgaatctcagtaagagcgccagcccaggcattaacgtccctcccggcacgaatagaccaggcttgggccagaatgagaatctgagtgccattgaggggaaaggcaaggtggggggactgaagacacgctgctctagctgcaacgttaagtttgagtctgaaagtgaactccagaaccacatccaaaccatccaccgagagctcgtgccagacagcaacagcacacagttgaaaacgccccaagtatcaccaatgcccagaatcagtccctcccagtcggatgagaagaagacctatcaatgcatcaagtgtcagatggttttctacaatgaatgggatattcaggttcatgttgcaaatcacatgattgatgaaggactgaaccatgaatgcaaactctgcagccagacctttgactctcctgccaaactccagtgccacctgatagagcacagcttcgaagggatgggaggcaccttcaagtgtccagtctgctttacagtatttgttcaagcaaacaagttgcagcagcatattttctctgcccatggacaagaagacaagatctatgactgtacacaatgtccacagaagtttttcttccaaacagagctgcagaatcatacaatgacccaacacagcagttagtgcaagtacagtctctcaaggagaattgattttgtggcacaaaaagggaacatgttttactctttgcacgaaactttcattgttaatgtatattattcagaaacattgtattgtaccataaaacttgtattatcaaactgttggatgttcatgtgtttgaacttttgcgcaccggatagaccccttgtatataaagtgttgcacatgtattatgtcgtctgatactaaaatggtcttataaagacaagtggacttgggccctattcaggcaagattaaaaaaaaaaaaaagactatgaccaaaatggcttaagataaagtatttttaaggaagaaagattaaaaacaactgttatacatgagactatggttggacttccttttctttacacttaagcctagaatttctctttaggtatatcagcgcttaaatccaagactattttttattgctgaagattcttgcaaaccatgaagagatgttctcacagaacagaaccccacagctggataaggcccgtatatatatatttgtaagccttgcaatgtgacaggtagcatcactatatatgcaatagttgttatgtagactgtcaaagaatttttttttccctggatacatttgaagctttgagtgttcaaggttttccttaatgatttcacgcagccaaattcttgaatcagttgaactaacctgtatgttactgttattaatgtttactctgcagtctgaacctggagattactggaattgttttccaagaggaaataaattcagtttaccattaggaaaaaaaaaaaaaaaaaaaac

SEQ ID NO: 8097 - DNA, 1671 bp, Homo sapiens
agttgttgaccagcctgccacttgcctccctgcctgcttctggccgccttgaatgcctggtccttcaagctccttctgggtctgacaaagcagggaccatgtctacctttggctaccgaagaggactcagtaaatacgaatccatcgacgaggatgaactcctcgcctccctgtcagccgaggagctgaaggagctagagagagagttggaagacattgaacctgaccgcaaccttcccgtggggctaaggcaaaagagcctgacagagaaaacccccacagggacattcagcagagaggcactgatggcctattgggaaaaggagtcccaaaaactcttggagaaggagaggctgggggaatgtggaaaggttgcagaagacaaagaggaaagtgaagaagagcttatctttactgaaagtaacaggaggagtcccaggaggaagaggaggaagaagacagtgacgaagaggaaagaacaattgaaactgcaaaagggattaatggaactgtaaattatgatagtgtcaattctgacaactcctcctcctccccctccttcttccaaaggctgccaccacctcctcctcctccccctcctccactcccagagaaaaagctcattaccagaaacattgcagaagtcatcaaacaacaggagagtgcccaacgggcattacaaaatggataaaaaagaaaaaagggaaaaaggtcaagaaacagccaaacagtattctaaaggaaataaaaaattctctgaggtcagtgcaagagaagaaaatggaagacagttcccgaccttctaccccacagagatcagctcatgagaatctcatggaagcaattcggggaagcagcataaaacagctaaagcgggtggaagttccagaagccctgcgataaaaacatgatctttagaagaggatgcagaactgttcagtggtattacatgaaatgcattgtgagatgtttctaaaataccttcttcaattcaaaatgatccctgactttaaaaataatctcacccattaattccaaagagaatcttaagaaacaatcagcatgtttcttctgtaaatatgaaaataaatttcttttttatgtcgtgagatttgtattggcaagaagcagttaatttaaagatgctcttcctatctgtggatgtgttggtaactccgagttgtaatgagttcatgaaatgtgctgttatttttgtaatctcaataaatgtggattgaagttttttcccttccaaaaaaaaaaaaaaaaaaaaaaaaaaaaaacttgatacatctgtcagatttttgtaatctcgataaatgtgtattgaagttttttccctttttttaaaaagccaaactaatatttttctgtgagttaatacatctgtcaggtgtgtatgtaacattactggacattaaaaaaaaatattacattctcacccaaaaagggtttgggtcctaagcatttgcctttctttgtttcctcttgttcaagaaaatctgattagatctctttctaaaggactgcaagcaataatttttttttatattttatttatttatttatttttttgagacaagtcttgctctgttacccagactggagtacagtggcacaatcataactcactgcagcctcaaactccttggctccactgatccttctgcc

SEQ ID NO: 8098 - DNA, 5127 bp, Homo sapiens
agcggatttccgtgttttctggagttttcagcggagcgggcttttgtacggctgcgagaagacgacagaagggggggagccccggggacccgggcttctgtgaaacatggcggtaggctgggaccataacacaagcatgactatatgaaggaagaggaaggttttcctgaagatgaggcgactgaatcggaaaaaaactttaagtttggtaaaagagttggatgcctttccgaaggttcctgagagctatgtagagacttcagccagtggaggtacagtttctctaatagcatttacaactatggctttattaaccataatggaattctcagtatatcaagatacatggatgaagtatgaatacgaagtagacaaggatttttctagcaaattaagaattaatatagatattactgttgccatgaagtgtcaatatgttggagcggatgtattggatttagcagaaacaatggttgcatctgcagatggtttagtttatgaaccaacagtatttgatctttcaccacagcagaaagagtggcagaggatgctgcagctgattcagagtaggctacaagaagagcattcacttcaagatgtgatatttaaaagtgcttttaaaagtacatcaacagctcttccaccaagagaagatgattcatcacagtctccaaatgcatgcagaattcatggccatctatatgtcaataaagtagcagggaattttcacataacagtgggcaaggcaattccacatcctcgtggtcatgcacatttggcagcacttgtcaaccatgaatcttacaatttttctcatagaatagatcatttgtcttttggagagcttgttccagcaattattaatcctttagatggaactgaaaaaattgctatagatcacaaccagatgttccaatattttattacagttgtgccaacaaaactacatacatataaaatatcagcagacacccatcagttttctgtgacagaaagggaacgtatcattaaccatgctgcaggcagccatggagtctctgggatatttatgaaatatgatctcagttctcttatggtgacagttactgaggagcacatgccattctggcagttttttgtaagactctgtggtattgttggaggaatcttttcaacaacaggcatgttacatggaattggaaaatttatagttgaaataatttgctgtcgtttcagacttggatcctataaacctgtcaattctgttccttttgaggatggccacacagacaaccacttacctcttttagaaaataatacacattaacacctcccgattgaaggagaaaaactttttgcctgagacataaaacctttttttaataataaaatattgtgcaatatattcaaagaaaagaaaacacaaataagcagaaaacatacttattttaaaaaaaaaaaaaaaaaaaaaaaaaaacccaaactgaaattctatatacgttgtgtctgttacaaatgtcgtagaagaaatcatgcagctaaacgatgaagaagcccaactggagtgttgctttgaagatgacgccttcttatattttcatagcaaatgggtggtatcaaaatcagacattgcttcttgctgataaaaagcctgaaggaaataagtgaaactacatctatgggaaaaaaaaaaacattgagaagtgcaaatgttcgcatccttttgtttttaaaagatatgatgtcagaataaaatgtggaaaacatacggaaaactagtctagactttaaagaattgtgatcaggtcacattgttaataaaaaaaaaaaacgggctagtccctatgttatagccatattaatgttaagccatattgacaagaccagttatccaataatttggtcttaaaaagtaactacttttctttgaactctggttattgacttatctaactgttgaagatagagtcttagaagactaaggtaaattctcacaggggcagatatgtaggtgttatgtaactagggtgtcattcacaaatggtatagtagaatcttatacacggaaaagaaagcacatttttttaaaaaagatgccaagttttttaatctaatcattatattattggtgtattttgggcaacatagggtgagttataaaaagatccgctactgatagtgaaaattaccggtttgtaaaacattaagagaaaaaataggatattttatacatgtggtgagtggagaacagggtaactttaaatgaaagtgtaaggcaaattgtaagcaccacaagatatatcagatttgagaggtgccatgttaaacattgtccattaaactataaaactgtattatgaagtatttgcattcagggtgtcctgaatatgattgattctgtattagattgtgttctaactttcttactatttaaggattggttctaaatcttcacattataagagattaaaaacagtgagagggagctatcacacaggtactattaaaagctgtatttggaatatgtgtaccaatatcagttttccttttgtagtactgaatggcagtagaagaatcagcagccaatcctcaaagtttaaatcatttaaggaaatggggaaacaaaattccaggtaaataacaagactgaaaaactagatttaaaatagtggttttagaaaacaggatatcacaagtaacagtttttcaaatggatttttttaaagataaatttatgaaaacaggataaacaatataatggagagaaggagaaatagtgatgggtctgttttgcagtaaagtttatgcagaatgacgttttgcagaaaataacagaagcatcactttaaaaaatatatcattaagagccatgacgttaactgatgaaaatgagtgatataacatactttgaaagatttttaaacagaaaattctgaatcgtgaatgagccttctctaggttttaattttttttcttcaaattatttccaacaaagtttggctataaactaacaccatctatccacaggaattttaataggaaaggattagaattgtagactgattgttggtcctttaagtatgcttggaagaaaattcaatcgagtttcaaggctttttctaaatgggagggagaacaatattgatttaggattattttctttcatttaggattagaacagttaagtgcctttaaaaaggactttaaaaattattttgatacttatatatgatttttaattgttttcgtattttccaaataccatattaaaattttaatgaaatttatctcctatgaaaggaatttctttaaagcaaaattctgctttgcctttgatttccattttaaaagttaaaggcttccatctgaaactcctcaaatagagtcagatttttggcaatggaagtattaaaattccgatcagccctttggacgatgaagtttacctgcatattaggatttgttaggagtttttggcctcaccaagtgattcttttctattgcagagagcactttactcacctacctgttatgcaactttccctatgcctggaggtgcctccagaccaggataccctactttgttacccaattctcctttttgttttacaagagtattcataatatctatatgtttatattccagactacatatttaaaaatgagatctcaaattatatgaaatggatttttaaatactgtgtttgcatacattgacctataaagaagattaaatatttaggtgaataattccctgctgcagtatttgtacacttcagactacctcttaggaaaagcttaacttagtattgcaaaattccctttctctttttttttttaagagatggggtctcgcactgttgcccaggctgaagtgcagtggcatgattgtaactcactgcatcctcgaactcctgggttcaagcaatcctcctgcttccatctgctgagtaggtaggactacagccatgcaccaacaaacctggctaattctttttcatttatatagttagtatcttgctgtgttgttcaagctggactccaactcccggactcaagtaatcctcccaccttagtctcctgcattgctggaattataggcacgagccactgcacctggcacccaaattacttctagttctcaagttagatgattaatatcacacttttctcatgtatgttttatgatagcattgaatttttataattaaaaatttactaatgcaaacaagatttacagtctttaatacaatcttaattttggaattcatgaaggaatgactaagttctaatttttttttttttttttttgaaactgagtctcgctctgtcgcctaggctggagtgcagtggtgcaatctcagctcactgcaacctccgtctcccgggttcaagtgattctcctgcctcagcctgttgagtagctgggactacaggtgcgtaccaccaagcccagctaatttttttatatttttagtagagacggggtttcactgtgttagccaggatggtctcaatctcctgacctcatgatccgcccaccttggcctcccaaagtgttgggattacaggcatgagccactgcccctggacagatctaattttttaatagtgtaagagagatacactgtgcattccatctatgtcctgagttagtaattcaagtaccaaaaagtaatttaatatgaaactccttgaaaattcagagcttacacttgaattcaaaatgcctatttttgattgtttaaaagttacttaaacctgagctttaggacctttaaaatctcagcatgccttttaagctagtacttttcctgttttgagctctagcaaaccttcagcaagccaaggtggtagccctttttcaacacaatcaaaatagagaggtcaccagttgtttactaccttatggtaaaatgcccggatcaagatccatgtatcccccccatattgtgatgatgcaatcaaagcatagtttttttctactttctgaaatattactgatgaaatcactttacatttaagaggagaaaacagactgccttggattttttttttgtcttgagagaaaaaacaaaatatttagtattgcaagcataaacatttggactcaataaatgacaaattatgaaaaaaaaaaaaaaaaaa

SEQ ID NO: 8099 - DNA, 553 bp, Homo sapiens
  misc_feature (334)..(351): n is a, c, g, or t
aaaggttgtagaatttatccttcttcatctatgtattggctaggctgggagggtgtgtggccatgagaatgtgcttctcagatctctgactgaggaaattgtaatttaccagcagtccagctgctgagttctgaaatccatcctgagctttgaaatccattgccctttactccgaggtctgtcttcccatacgctgctcatagccaataactgagcccaacggggattttaggacaggactgttcctgggataagtgatactcttccgatgggtgactttgactcaaggactcctcaatggccttgccaaactttccttagaacttcattgcannnnnnnnnnnnnnnnnnttgaacaccttccctctgtccttcactcagggtcaggcctgcgtcactgtgcgatggctctctcagtcttccccttccatttcctctcataataaattttttatttattatatattaatatatatattatataatatatatataatataattattatatatattaataaattatgtttttcataataaatttattgcatttt

SEQ ID NO: 8100 - DNA, 2920 bp, Homo sapiens
  misc_feature (1466)..(1489): n is a, c, g, or t
cggcgctgggagacaccggacgcccgctcggctgcgctgcggctcaggcccccgctcgggcccgacccgctcggtcaccgccggctcgggcgcgcacctgccggctgcggccccagggccatgcggaggcccacgaggaggccggcggccacgcgcatcccgtagcccaggtggcccaggtctgcaccgcggcggcctcggcgccatggagcccccgtattcgctgacggcgcactacgatgagttccaagaggtcaagtacgtgagccgctgcggcgcggggggcgcgcgcggggcctccctgcccccgggcttcccgttgggcgctgcgcgcagcgccaccggggcccggtccgggctgccgcgctggaaccggcgcgaggtgtgcctgctgtcggggctggtgttcgccgccggcctctgcgccattctggcggctatgctggccctcaagtacctgggcccggtcgcggccggcggcggcgcctgtcccgagggctgccctgagcgcaaggccttcgcgcgcgccgctcgcttcctggccgccaacctggacgccagcatcgacccatgccaggacttctactcgttcgcctgcggcggttggctgcggcgccacgccatccccgacgacaagctcacctatggcaccatcgcggccatcggcgagcaaaacgaggagcgcctacggcgcctgctggcgcggcccgggggtgggcctggcggcgcggcccagcgcaaggtgcgcgccttcttccgctcgtgcctcgacatgcgcgagatcgagcgactgggcccgcgacccatgctagaggtcatcgaggactgcgggggctgggacctgggcggcgcggaggagcgtccgggggtcgcggcgcgatgggacctcaaccggctgctgtacaaggcgcagggcgtgtacagcgccgccgcgctcttctcgctcacggtcagcctggacgacaggaactcctcgcgctacgtcatccgcattgaccaggatgggctcaccctgccagagaggaccctgtacctcgctcaggatgaggacagtgagaaggtcctggcagcatacagggtgttcatggagcgagtgctcagcctcctgggtgcagacgctgtggaacagaaggcccaagagatcctgcaagtggagcagcagctggccaacatcactgtgtcagagtatgacgacctacggcgagatgtcagctccatgtacaacaaggtgacgctggggcagctgcagaagatcaccccccacttgcggtggaagtggctgctagaccagatcttccaggaggacttctcagaggaagaggaggtggtgctgctggcgacagactacatgcagcaggtgtcgcagctcatccgctccacaccccaccgggtcctgcacaactacctggtgtggcgcgtggtggtggtcctgagtgaacacctgtccccgccattccgtgaggcannnnnnnnnnnnnnnnnnnnnnnngagggcagcgacaagccacaggagctggcccgggtctgcttgggccaggccaatcgccactttggcatggcgcttggcgccctctttgtacatgagcacttctcagctgccagcaaagccaaggtgcagcagctagtggaagacatcaagtacatcctgggccagcgcctggaggagctggactggatggacgccgagaccagggctgctgctcgggccaagctccagtacatgatggtgatggtcggctacccggacttcctgctgaaacccgatgctgtggacaaggagtatgagtttgaggtccatgagaagacctacttcaagaacatcttgaacagcatccgcttcagcatccagctctcagttaagaagattcggcaggaggtggacaagtccacgtggctgctccccccacaggcgctcaatgcctactatctacccaacaagaaccagatggtgttccccgcgggcatcctgcagcccaccctgtacgaccctgacttcccacagtctctcaactacgggggcatcggcaccatcattggacatgagctgacccacggctacgacgactgggggggccagtatgaccgctcagggaacctgctgcactggtggacggaggcctcctacagccgcttcctgcgaaaggctgagtgcatcgtccgtctctatgacaacttcactgtctacaaccagcgggtgaacgggaaacacacgcttggggagaacatcgcagatatgggcggcctcaagctggcctaccacgcctatcagaagtgggtgcgggagcacggcccagagcacccacttccccggctcaagtacacacatgaccagctcttcttcattgcctttgcccagaactggtgcatcaagcggcggtcgcagtccatctacctgcaggtgctgactgacaagcatgcccctgagcactacagggtgctgggcagtgtgtcccagtttgaggagtttggccgggttttacactgtccaaaggtctcacccatgaaccctgcccacaagtgttccgtgtggtgagcctggctgcccgcctgcacgcccccactgcccccgcacgaatcacctcctgctggctaccggggcaggcatgcacccggtgccagccccgctctgggcaccacctgccttccagcccctccaggacccggtccccctgctgcccctcacttcaggaggggcctggagcagggtgaggctggactttggggggctgtgagggaaatatactggggtccccagattctgctctaagggggccagaccctctgccaggctggattgtacgggccccaccttcgctgtgttcttgctgcaaagtctggtcaataaatcactgcactgttaaaaaaaaaaaaaaaaaaaggacttttgggaggaaaagtaagggcggatttcgccctttaa

SEQ ID NO: 8101 - DNA, 1129 bp, Homo sapiens
  misc_feature (451)..(451): n is a, c, g, or t
tgcctctggaggcttttagagctttctgttgacgtggttgtgtcccaatatttatttccgccccccgcgagagttaaggtttcttttctcaagaggttatcccaaagttaagcaagtttttccccgggcgacgagggttggtaaatcgcgggggcaaggtgccttggtttattaatggggaccccccttttgggggaccctttgtgtccaagaaaagctggggtactggtaagcctttggcccctggagggggattcttttggagcgggccccccgtggtgcaggggaacgagggcaaggggacgctgggaggggcgggcagattaattttcttaagggttgtcgggcaggtagtcagatgtgttggattgattccaactggccagagtaaggaattccagcatcctcttcctgcttgctcgtgttaccccacagatcaaaccctcaattntagttgggggatgctgtctagccccacaccgtgactgaagccttaagcactgttgcgcctccatgtgctttggatcagcaaccccagtggtattctaccagagcattgtgggaaagcagatgtatagtcaggtcccaacagcaaattgttgggtgtgagagttctaaagtataggggtgagggaagagaaggatatgaactcctctgaccttaagccagcattcatttaacttttatgtctacttaacaagagaacctggagaaaactaccgtattcaagagattaatcaaaatcagtgttttagccaggcgatgacagagaagcaccattcctcaccctccattcttgtaatgtctgtaataaatttcagtgcgtcaggatggatgaacccaagatccagtgaatgattcagctgttccaagccttacattttccatcattcatcatccattctcattcagtgtaacctcttgcactattgtggttaattttatgtaaaaccagtttatgtttttttttttttaatatgtgcctatgtaataaagtctacacactggctatctctgtagaggtgaggttttgtttttagttgttctactgattatatccttttctgagctatgaaaatgaattattaataaaaaatttttgaacaaaaaaaaaaaaaaaaaaaaaaa

SEQ ID NO: 8102 - DNA, 4527 bp, Homo sapiens
  misc_feature (611)..(644): n is a, c, g, or t
  misc_feature (889)..(972): n is a, c, g, or t
  misc_feature (1618)..(1633): n is a, c, g, or t
agaaagcggcgcgcggagggtgtgagatggcagacaggtttgcaggaaaccctcagaaagggggctggaggatttagccactctgtcctccccttccggcagtccagggcctcctcccgagcacagcggcgctatggactctccaggatacaactgcttcgtggacaaagacaagatggacgctgccatccaggacctggggcccaaggagctgagctgcactgaactgcaggaactgaagcagctggcgcgccagggctactgggcccaaagccacgccctgcggggaaaggtgtaccagcgcctgatccgggacattccctgccgcacggtcacgcctgacgccagcgtgtacagcgacatcgtgggcaagatcgtgggcaagcacagcagcagctgcctgccgctgcccgagttcgtggacaacacgcaggtgcccagctactgcctgaatgcacgcggcgagggggccgtgcgcaagatcctcctgtgcctggccaaccagttccccgacatctccttctgccccgccctgccggccgtggtggccctgctgctgcactacagcatcgacgaggccgagtgcttcgagaaggcctgccgcatcctgnnnnnnnnnnnnnnnnnnnnnnnnnnnnnnnnnngcaggaggctgatcgaccagagcttcctggcctttgagtcgtcctgcatgacgtttggggacctggtgaacaagtactgccaggcggcccacaagctgatggtggccgtgtcggaggatgtcctgcaggtctatgcggactggcagcgctggctgtttggggagctgcccctctgctacttcgcccgggtctttgacgtcttcctggtggagggctacaaggtgctgtaccgcgtggcgctggcnnnnnnnnnnnnnnnnnnnnnnnnnnnnnnnnnnnnnnnnnnnnnnnnnnnnnnnnnnnnnnnnnnnnnnnnnnnnnnnnnnnnccgcacgttcgtcagagacatcgcgaagacggtgtcccctgagaagctgctggagaaagcgttcgccatccgcctcttgtcccgcaaggagatccagctcctgcagatggccaatgagaaagccctgaagcagaagggcatcaccgtgaagcagaagagtgtgtcactttctaaaaggcagtttgtacacttggccgtccatgcagagaacttccgctcggagatcgtcagcgtgagggagatgagagacatctggtcctgggtccccgagcgctttgccctgtgccagccccttctgctgttctcctccctgcagcacgggtacagcctggccaggttctacttccagtgtgaaggacatgagcctaccctcttgctcatcaagaccacgcagaaggaggtgtgtggtgcttacctgtccacagactggagtgagagaaataagtttggaggcaaactgggcttctttgggaccggagaatgctttgtgtttaggctgcagcctgaggtgcagcgctacgagtgggtggtgatcaagcaccccgagctgaccaagcccccacccttgatggctgccgagcccaccgccccactcagccactccgcctcctcagaccccgctgaccgcctctcgcccttcctggcnnnnnnnnnnnnnnnnctgccctccaagaccgagtccatgttcatggcggggggcagcgactgcctcatcgtcgggggaggaggcggccaggcgctctacatcgatggggacctgaaccggggccgcacaagccactgcgacaccttcaacaaccagcccctctgctccgagaacttcctcattgctgccgtggaggcctggggcttccaggaccctgacacccagtgacggcctgtgccacggtgactgagccgtggtggggcggtgggccgaggctgggctgccgcctcgggcagcagagagcagatgaaacccccatgtggtaggcagggttgggggacggcaggaccccatggccaagcctggcgttgcctggacctgctgctgcctctacctggggtttgggctgggcttccccagtccacctgcatctgggtcagagctggagggcctgctgtgcccccagccccacccagagctggcataggaagtaccttcctcctccgtggaggcttccatagcccaaggccttgggagtgtctgggtcttgctgcccctgagcctctctaggcagcctgagcccctggggtgggagtacaacggcagtgggaacgtgcagctaagggtgggcctgtggtgccccctgctggtgccgcatagcatcgcgccctcctgagcagggccctgcagcctggctggctggcgactgaatcccagcgtagatcccgagaacagactggcacccttgggcctgccccctggcggaccccaccccctgtcctgggcgtttgccccagttccctccccaggcctcctgggccacctctcacattaacccttcttggctgcctctgaggctcccctgggctgcgtttgggagctgctgggtgggaggaggagggtgggatttgtgctgggctccacccccagggagggtgggagctggagggggatgtcacatgtccttgtgtttctgcagagcctgaagcttttgctgggcctccctgcgtgttcccatctgaagaggtagccccgggagaggccctcagggaccgacccagaccagcaagctccatttccaggggtctgcccagagaagcctggacccagggggcttctcagctcccctcccttccagcccaggcctccttgagctcctgtagcctctgcagctgcccatttcacctctttgtcattgcaatgacctggggcccagggtcacgcccaagcccctctttgtggcatgctcatctcagtgcagccccaactgcttctctgcaccaggccccgtgccctcccctggccctggccacacagcacctccttggccaccttgcatggatgcatgtcctccctctgtccctcttgtggtgctgtggctggccacgtgtcagggttttctgtgagcctctcaccttacagcctttgggcccctgggcccctgccctgcctgagccctgcgctggccagacgcaggtaggtgccaggggaggccttgcctctgggcactatagggggcagccccctgccttgtgacctccctccatgccccatgacctccttcaactcgtcttgagggtctggtcaccacggaggggagaagggagacacagaggcccaagtggctgttctgggaccatggaagcctgggtcacagaggcaggtaccagcagtcctgcccccacccccgtccctgctggcctccagccagtgccacttggagtcccctgcaccgtgccactttccatccccacaccattgcctgctcctcccatggggctttagcctcccctgaccatctgctcatgtagcctctgactgggcgcacagtggtgcaggaggaaggaccgggaaccctgtgtggctttgggcaagctgacaaacccgtctggaactcagtttccccagctgtgaaatggggccagtccccatgccctgctgtcctcctcacaggactgttgagaggctcgcagggggatggggtgaatccctctcacggggagaggtatgggagggaagtcgccactcatctcagcccaccgcagccctccaggcccccgcctgagcccctgaggccctcatctgtaccgccagctttggtgttcattaaacatggtcttgctgcatcaactccagggctccaagctgagtctgatctcttcagccagaggggcctccgggggcttcctgggcctacagccaagcaggtgtgggaggctgcccgctgtagtgctcacccacattctatgactggaatgctgcaagcctcttccagagggagccctccaggagcagggaagtcatatccgtggaccatttgtaggtttccctctgcaaacttcctgaactgggtggtgatttttctggcgagttaagtccagcaggttctgcgtggctgcccccagggggccccacccgggccttccagtgatctggaccaggaagacggattgctgctgggtcatgatttccacatcatgagcgaagttctttgttttttgtgtgcatgcaaaatattgtttctttaaatttaatatcttttcctaacttttctactaacctagaaggtatgtgtgattattatcttttttattcttatcactgtacttgttagtatctgatattaggtattcccaaatagaacataatttattttgttaatgttctctatttcttcttgattatttattagctttggatgttaaaaattagccaaaagtggctgctctgcctatgaagtagccattctttgtttaaaaaaaaaaaaaagccaacatttgttgaaactgcataataaattatcatttgtttttagaaacattcaaagaattattttttgatttttttttttttgggacagagtcacccaggctggagtgcagtggcatgatcttggctcactgcaacct

SEQ ID NO: 8103 - DNA, 1395 bp, Homo sapiens
gccttctctgcatcaacaatgcctttttctgaatcaggagccgtagatgagccctccactcactgcttgttccgacttgcttacaatgacttcctttttcttctccaactctgcagaccaacaaagccgtggccaagggggacttgcaccaggccagcaccagctcccggcgggccctattcctggcagtgctgtccatcaccattgggactggcgtctatgtgggcgtggccgtggccctcatcgcctacctctccaagaacaaccacctgtgagcttcctgcgaatggagggggagcacccggggccaggtctgtgtggacgtggaggaagcaggcataccgcatgatgctgtacagtacaaatgattgccaaatgatgccacgaagccctgggatttcctacccatggatttattttgtttttatcctttaatttcatgttcacagcactgtgtagagcaccagacagacgggcactgctaatccttccaaaggaaagctccaaagatcccagcccgcaaggctgtctctggatggattctggtggatgaatggcaacgcggctctctgcagcctgccagtgcccagagtgccaccgcattagcaatatacaaacagtccaaaaaagtgtttattttttatggaatacggtgcaataggcagaggacaagggacacatcactcttctgtctgtggccctgctggagtcctttgtgccccccggagtccacacgccttccctgcaagacgagaatggggctgggaaagaaagaggcaacaccacggctggcaggagccccgctgcactgctctgcagacccattggcctgaccctgagaagcagagccagcaaagcccgggacctgcccctctttctttcccttcacaccaccccagcctcaggatgtcaagccacctccggaacgtgtctacactccacagctaccccgcagcaatacgcactcttgggacctcgctgatctaggatggggaggcaggccaccgcccctcccaagactcctcaagaaagagccccgcggttgctccggaaactcgaggcactgcagctatgggcactgcctcagcctaaagacacaggggcgcctcccaatcaccgcgctggcggatgctcaccccgtcataagcagaaactagtgatcctggaaatgagatgggccttactctgtcgactaaatgaatagctattttcttgtcattttttaaagtgcaactcttgcttcatgctgcttaagttaccagatgaatgctgagaaataagtaatcacagacattttaataccatttcattgctgttttacgagtgttcattacttaacaaaaaattatcttttagctttttcgcttaagacttttctttttgatgaaaaaaaaa

SEQ ID NO: 8104 - DNA, 3259 bp, Homo sapiens
  misc_feature (142)..(156): n is a, c, g, or t
aattccggcccttagcccgctgccctcaatcccagcgaggctggggctccggctcggcgcccccttcctcgctccctggtccggcgccccatgccgcccccgcccggtccccggctcccccagtcccccacttaggcgggcnnnnnnnnnnnnnnntgctggcgcgtgggccgggggcgcgtagggcgcctgcagacggcccctggaagggctctggtggggctgagcgctctgccgcgggggcgcgggcacagcaggaagcaggtccgcgtgggcgctgggggcatcagctaccggggtggtccgggctgaagagccaggcagccaaggcagccaccccggggggtgggcgactttgggggagttggtgccccgccccccaggccttggcggggtcatggggcccccccattctgggccggggggcgtgcgagtcggggccctgctgctgctgggggttttggggctggtgtctgggctcagcctggagcctgtctactggaactcggcgaataagaggttccaggcagagggtggttatgtgctgtaccctcagatcggggaccggctagacctgctctgcccccgggcccggcctcctggccctcactcctctcctaattatgagttctacaagctgtacctggtagggggtgctcagggccggcgctgtgaggcaccccctgccccaaacctccttctcacttgtgatcgcccagacctggatctccgcttcaccatcaagttccaggagtatagccctaatctctggggccacgagttccgctcgcaccacgattactacatcattgccacatcggatgggacccgggagggcctggagagcctgcagggaggtgtgtgcctaaccagaggcatgaaggtgcttctccgagtgggacaaagtccccgaggaggggctgtcccccgaaaacctgtgtctgaaatgcccatggaaagagaccgaggggcagcccacagcctggagcctgggaaggagaacctgccaggtgaccccaccagcaatgcaacctcccggggtgctgaaggccccctgccccctcccagcatgcctgcagtggctggggcagcaggggggctggcgctgctcttgctgggcgtggcaggggctgggggtgccatgtgttggcggagacggcgggccaagccttcggagagtcgccaccctggtcctggctccttcgggaggggagggtctctgggcctggggggtggaggtgggatgggacctcgggaggctgagcctggggagctagggatagctctgcggggtggcggggctgcagatccccccttctgcccccactatgagaaggtgagtggtgactatgggcatcctgtgtatatcgtgcaggatgggcccccccagagccctccaaacatctactacaaggtatgagggctcctctcacgtggctatcctgaatccagcccttcttggggtgctcctccagtttaattcctggtttgagggacacctctaacatctcggccccctgtgcccccccagccccttcactcctcccggctgctgtcctcgtctccacttttaggattccttaggattcccactgccccacttcctgccctcccgtttggccatgggtgcccccctctgtctcagtgtccctggatcctttttccttggggaggggcacaggctcagcctcctctctgaccatgccggaggcatccttgtccccctcacccacccagagctaggggcgggaacagcccaccttttggttggcaccgccttctttctgcctctcactggttttctcttctctatctcttattctttccctctcttccgtctctaggtctgttcttcttccctagcatcctcctccccacatctcctttcaccctcttggcttcttatcctgtgcctctcccatctcctgggtgggggcatcaaagcatttctccccttagctttcagccccccttctgacctctcataccaaccactcccctcagtctgccaaaaatgggggccttatggggaaggctctgacactccaccccagctcaggccatgggcagcagggctccattctctggcctggcccaggcctctacatacttactccagccatttggggtggttgggtcatgacagctaccatgagaagaagtgtcccgttttgtccagtggccaatagcaagatatgaaccggtcgggacatgtatggacttggtctgatgccgaatgggccacttgggaccggaagtgacttgctccagacaagaggtgaccaggcccggacagaaatggcctgggaagtagcagaagcagtgcagcaggaactggaagtgccttcatccaggacaggaagtagcacttctgaaacaggaagtggtctggctggaactccaagtggcttagtctgggcggatcaggaggtgggagcgtggatggttcttattctgtggagaagaagggcgggaagaacttcctttcaggaggaagctggaacttactgactgtaagaggttagaggtggaccgagaaggacttttcccagtcttcagtggcacttcccaagatctcccttccccttgtgctctgtgctgattttaggacagctaagatgactgccatgtgcctgtggcaggccctaatttttgtcttgttctttccctttccatatcccagtataatctctgtttaatccaacaggactatcccccaagaacccatgtgctctcccgagtaaccccagatggctgtcttgttcattccatcctacatttctgactcctttcagactcaacacagttcccttcttagtgaccaaaatggtggcctactggctggtctagctgacagtggtacttagcaaaggccactgtttccatagtgaccagctgatacctcttcctgccctctagtgtgcaattgggtgttgcctcagtttcctcccagctcagttttattagatcaaagctgttgttgggcaccaggttggccacctcaatcaccagccaagatggttgctttgtccaccagaggtcaagttcacctctctggtgctgtagttcccagctccttcctgatttttctaatcgctccttctggggaacaggaagttgatattgccatggtggcgggatatgccgtcacctcagtagttttactgtaaaagggaaatttgaacaacaaaaaccaaaaaaaataaaaataaaaaacttcaaaagttgaaaaaaaaaaaaaaaaaaaaaggtatacgcg

SEQ ID NO: 8105 - DNA, 1632 bp, Homo sapiens
  misc_feature (52)..(52): n is a, c, g, or t
ccgggggtacccccccggggtccgtttttttttccattttattttccgcccngggacatttgctgactccagtgtcccgagaggcgccgcttcttccgctttctcgtcaggctcctgcaaccccaggcatgaaccaaggtttctgaactactgggcgggagccaacgtctcttctttctcccgctctggcggaggctttgtcgctgcgggctgggccccagggtgtcccccatggcggggccgcgggtggaggtcgatggcagcatcatggaagggggcggccagatcctgagagtctctacggccttgagctgtctcctaggcctccccttgcgggtgcagaagatccgagccggccggagcacgccaggcctgaggcctcaacatttatctggactggaaatgattcgagatttgtgtgatgggcaactggagggggcagaaattggctcaacagaaataacctttacaccagagaagatcaaaggtggaatccacacagcagataccaagacagcagggagtgtgtgcctcttgatgcaggtctcaatgccgtgtgttctctttgctgcttctccatcagaacttcatttgaaaggtggaactaatgctgaaatggcaccacagatcgattatacagtgatggtcttcaagccaattgttgaaaaatttggtttcatatttaattgtgacattaaaacaaggggatattacccaaaagggggtggtgaagtgattgttcgaatgtcaccagttaaacaattgaaccctataaatttaactgagcgtggctgtgtgactaagatatatggaagagctttcgttgctggtgttttgccatttaaagtagcaaaagatatggcagcggcagcagttagatgcatcagaaaggagatccgggatttgtatgttaacatccagcctgttcaagaacctaaagaaccaagcatttggcaattggaaatggaataataattattgctgagacctccactggctgtttgtttgctggatcatcgcttggtaaacgaggtgtaaatgcagacaaagttggaattgaagctgccgaaatgctattagcaaatcttagacatggtggtactgtggatgagtatctgcaagaccagctgattgttttcatggcattagccaatggagtttccagaataaaaacaggaccagttacactccatacgcaaaccgcgatacattttgctgaacaaatagcaaaggctaaatttattgtgaagaaatcagaagatgaagaagacgccgctaaagatacttatattattgaatgccaaggaattgggatgacaaatccaaatctatagagtatttgcctcttaaatgatacctcattgatatattgcactatttcataaatactataaaataatgactaggaagtaacttattaaaggctatgacttaaatttgaagatgaagtacagtgttctaggtttgctgagaaggcttcattaaattaatctcactttgaatatctcctgagagatggacaatgaaatatcagttggtggatatgtgtgatagctgatttcaatattgaagtattgaaataaaatattctttacacctgagaaaaaaaaaaaaaaaaaaaaaaaaaaaaaa

SEQ ID NO: 8106 - DNA, 1926 bp, Homo sapiens
gcggtgctgctggggctcggcggggccgtgtctggtctgcaaggcgcgcgggctcgtggggggttggctggggagcccacgctgcctggcgactcgggccaccgaatgtgagaccgagtccctttatgtcaccagcgcacacgctgatttgaaccctgcttcgacgtgtgtgtcatggcttaaaaatagctgctaatctgtcaacctgtcttgggcagaaacagcggcggcgacagcagcaggagcgtcatggccgtggcgctgtctgcgccggcgatccgcctttcggactgaggcccagcgcagcgcttgcaaagagcagcagctacctggcaactgaacccatcatcaccacagccactcctgcagctgccacggtttctgccacctctaagatgtgccctggtaactggctttgggcttctatgacttttatggcccgcttctcccggagtagctcaaggtctcctgttcgaactcgagggaccctggaggagatgccaaccgttcaacatcctttcctcaatgtcttcgagttggagcggctcctctacacaggcaagacagcctgtaaccatgccgacgaggtctggccaggcctctatctcggagaccaggacatggctaacaaccgccgggagcttcgccgcctgggcatcacgcacgtcctcaatgcctcacacagccggtggcgaggcacgcccgaggcctatgaggggctgggcatccgctacctgggtgttgaggcccacgactcgccagcctttgacatgagcatccacttccagacggctgccgacttcatccaccgggcgctgagccagccaggagggaagatcctggtgcattgtgctgtgggcgtgagccgatccgccaccctggtactggcctacctcatgctgtaccaccaccttaccctcgtggaggccatccagaaagtcaaagaccaccgaggcatcatccccaaccggggcttcctgaggcagctcctggccctggaccgcaggctgcggcagggtctggaagcatgaggggagggggagagaggtcaggccaggcccgtgggtaggtccctggctcccactggagataggagccccagtggcaggtagcaggaggcccagatcacccatcctcccctggggtcaggagaggccgagccccaggccactgtcactctttgtgggaggggacggggagtgaggttgggcagtgtggtggatgggcacccaggaagggttgaccagggaaggaggcagctaggctgtagatggaagatggtcctgggattcgaacaccgctgggatctggccagggtgctccctgggattcacagtcccttcccctctttgtgcccaagtgtttccctctctccctcaccaaaacaaaagggccatctctgccctgcacttgtgcagaaagtcagggatacggcaagcatgaatgcaatggtgtagagttgtgtgaaacccctagcatagagacagacagcgaagagatggtgtgaaaagcttgcagaaccagacagagaaccccacagactttccactccaagcacaggaggaggtagctagcgtgtgagggttggcactaggcccacggctgctgcttgggccaaaaacatacagaggtgcatggctggcagtcttgaaattgtcactcgcttactggatccaagcgtctcgaggataaataaagatcatgaaaaaaaaaaaaaaaaaaaaaaaaaaaaatggggacgccgagaccagaaaagtttaaaaaccttcgggtgggggccgggcccacagaggtagagaaaagggcaggggccaaagaaaccggcacgaaaaagggggggttcccacaaaaaacggcggggaacgacgtcgaaaaaccaagggcggggcaagggctcaaaggggccggagcgataccaacgggagg

SEQ ID NO: 8107 - DNA, 3434 bp, Homo sapiens; identical to SEQ ID NO: 6698

SEQ ID NO: 8108 - DNA, 2629 bp, Homo sapiens
  misc_feature (645)..(703): n is a, c, g, or t
tgactcgatgtcctcggagagcacctgggacgcatggaacgagaggctgctggagattgagaaggaggcttcccggaggtaccacggcaagagcaagagagaggaggcggcagacaggagctcagaagcagggagcagggtgcgggaggatgatgaggacagcgtgggctctgaggccagttccttctacaacttctgcagcaggaacaaggacaagctcactgccctggaaagatggaagatcaagagaatccaatttggatttcacaagaaagacttgggagcgggagacagcagcggtgagcccggtgcagaggaggcagtaggggagaagaacccctccgacgtcagcctgacagcctaccaggcctggaagctgaaacaccagaagaaggtgggcagtgagaacaaggaggaggtggtggagctcagcaagggggaggactcggccttggctaagaagagacaacggaggctggagctgctggagagaagccggcagacgctggaggagagccagtctatggcaagctgggaggcggacagctccacggccagcgggagcattcccctgtctgcgttctggtctgcagacccctcagtcagcgctgatggggacacgacgtcagtactgagcacccagannnnnnnnnnnnnnnnnnnnnnnnnnnnnnnnnnnnnnnnnnnnnnnnnnnnnnnnnnncccaccacacccctgcctaacctgccagtggggcctggagacaccatttccattgccagtatccagaactggattgccaatgtagtcagtgagacccttgctcagaagcaaaatgaaatgctgctgttgtcccgctcaccgtctgttgcaagcatgaaggcagtaccagcggctagctgcctgggggatgaccaagtctccatgcttagtggacacagcagctcctccttgggtggctgcctgttgcctcagagccaggcaagacccagctctgacatgcagtctgtgctgtcctgcaacaccacactgagctcacccgcggaaagttgcagaagcaaagtgagggggaccagcaagcccatcttcagcctctttgctgacaatgtggacctaaaggaacttggccggaaggagaaggagatgcagatggagcttagggagaagatgtctgagtacaaaatggaaaagctggcctcagacaacaaacgcagctccctcttcaagaagaagaaggtcaaggaagatgaggatgatggtgtgggtgatggggatgaggacactgacagtgccatagggagcttccgatattcttcccgcagtaattcccagaaacctgaaacagacacatgctcctccctggctgtctgtgatcactatgcaagtggcagcagagttggcaaagagatggatagcagtattaataagtggctcagtggcctcaggacggaggaaaaacctcctttccaaagtgactggtctggaagttccagagggaagtacaccagatcgtccctgctcagggagacagagtctaaatcctccagttacaagttttccaaatcccagtcagaggaacaggacacctcctcctaccacgaggcaaatggcaactctgtaagaagcacttcacggttctcatcttcctccaccagggagggcagagagatgcacaagttctccaggtccacgtacaacgagacctcaagttcccgagaggagagcccagagccctacttcttccgccggaccccagagtcctcagaaagggaagagtccccagaaccacagcgcccaaattgggccaggtccagggactgggaagatgtggaagagtcatccaagtcagacttctctgaatttggagccaagaggaagttcacccagagctttatgaggtctgaagaagagggagagaaagagaggacagaaaacagagaagaagggaggtttgcatctggacggcggtcccagtatcggagaagcactgacagggaggaagaggaagaaatggacgatgaagccatcattgctgcttggagacgccggcaagaagaaaccaggaccaagctgcagaaaaggagggaggactgagctggggaaaatctgagaacactgaaagaaaccactcacgttagcatagggctcagggcacacgttgccaccactcatcgcaggatgaggatacagagaggatcttccagaggggcagagccaaaatgagaggtaccaagcataagggcagcagaggtggagtagggaggaggcaaggagggggagaaccatcaatacgaatacgaggtccgaatgcggaccaactgataccattttctgttgctcagcgccctctaagctttggtgtttcacttaatgtatttgacagtgttcatcacaggctagagaggtgagcttggaaaagcactgtagtttgtcagagactccagtttacatccagaaaggccatgaacataggacacgcttctgtctgtagaggcttcatatgagacccagaaagtctatcctatggcaagtctgacctctcctggcaatgctcagttctgattttttttttttaatgttttgagtctccattaaaaatggtatgttggcaaatagtcctccttaatcctggccatgttacctttgggg

SEQ ID NO: 8109 - DNA, 842 bp, Homo sapiens
ttttttttttttttttttacagagtaagacgcttataatatgtgaagttctgtccacagttacctgagatgttagggttagttgagcttaaaatagatacttccaattagaagcagccaaatataattttttatgtgagaaaataactgcaatgctagtatgaccctttattttcctagggctaaagtcagaaaacagaaacaaatataaaagtatcacattcatgtcaatggcttagtgaagacaggaccttattatcctttaaatgctgcttaaaatgctcccagactcgcccgtttatctgctcctcttccagcagagtgtctggcacaaaatggctgttccttcaatctctgccaatccccatccacatctttcaactggcaggaatttccctaattaaatgctacctgcagtatttttatcacactctcaatcatcactgtacttaaaagcttagctcataactgtcttttaatactttaaaaaatatggcttatgtaaattttataaaaatcatttaattgtacattgaaaatggtattttatggcatgtaaattatgttcatatgcggttaggttcttgttctcaagttatttcattttgcttctttttctttaaaatttattcaacacaacagttcaaggaatgaaaagattccctctttttctttaacatcttttcactcttcccggtaggcaagcgtaagattaacattaagtgacacataaattgcctctttctgtcttttgagctcaatgccctgaaagcagcccaatctcctaccttttatgtttgttggtaaatttaaactgaagaattaaacagattgcggtgtttg

SEQ ID NO: 8110 - DNA, 3424 bp, Homo sapiens
aacgaggcttccggtggcgaaaagggtgtcgggagcggcttcctgcggcccttccctggcatctggagggaccaccgttgccgcgtcttcggcttccacgatctgcgttcgggctacgcggccacggcggcagccactgcgactcccactgtgcctggctctgtccatattagttcccaggcggccgtcgccgttccagcagcggcagcggcagcggcagcggcggacatgttgtgaggcggcggcgcgggtgtctgaaggatggtttggccgaggcggcggcaacggctgctggcggcggcggcagcggcagcggggcctcgggctctatagagccgagcccgctgggtacccgcccggtaccgcggcgaggccagtgcccctggatcttgcctctgctccgacgccgttggggaccagttaggcgacagcgcccgcccctctgaggagacacgaaggtggttccccagccgctcaaatttccggaccaccgcgctttcccctcctcagcctgggctgtgctctctctagaatcctcgggcccccactttcttcccaaactcatcctaaatctctcacacacgcgagtgttcccagccctcaagccagctgctcctccgttcattttctgcaccctcttcgcaaagcaccccccgggatcactctccgagggcgactttttgagaaatctcggtggagtagtggaccagagctggggagtttttaaaagccggggcgcgagaaacaggaaggtactatggcttcctcgtctggcaacgatgatgatctcactatccccagagctgctatcaataaaatgatcaaagagactcttcctaatgtccgggtggccaacgatgctcgagagctggtggtgaactgctgcactgaattcattcaccttatatcttctgaagccaatgagatttgtaacaaatcggaaaagaagaccatctcaccagagcatgtcatacaagcactagaaagtttgggatttggctcttacatcagtgaagtaaaagaagtcttgcaagagtgtaaaacagtagcattaaaaagaagaaaggccagttctcgtttggaaaaccttggcattcctgaagaagagttattgagacagcaacaagaattatttgcaaaagctagacagcaacaagcagaattggcccaacaggaatggcttcaaatgcagcaagctgcccaacaagcccagcttgctgctgcctcagccagtgcatctaatcaggcgggatcttctcaggatgaagaagatgatgatgatatctgaaattcaccagctgagtttctatttcttctataaatgtttttccctgcacaacaaaaacagtgaaagaaatgcttatctgtaattttgtatgcatcttggtggacttgtcattggtattctagggatgtctgctattaagtttcatctattgtgtgctatacatgtaaaaactgtctctttgaactattgaaaatttaaggttcagtataatatcaattttgaatttttaatggtgtttatgaaattttagatagcagcgagtccttcgtttgatcaataaacagtgttacagataacttcaagtttataaaaatacagtgaaatttctacaaagctctaaatctgcatttgcatttcctctgcccttttaactaaactaaaacttgtgaattttaaattattaaggggggggtgctgtgtgaatcagtagacattggattgggttggtgaaagagttcagttctgtagtatctgaatttgtcttttaaaatgagtacatatataggcaataaatatatatgctcagatcaatatacttgtttagaaaaacttcaagacattcaaaaactaggaaggagtatgtttaatagtatttgtataaatttggtggttatgtttttttattttgtttctgttttgtgtagaggtaaaaactatagttttattacagcataattcattttgagctccactatgacatttcaaagactgcccagtttggaagtctgtcatgatttttactctttcactccaattcagtaattgttgatagtattacttacctagtccatccatactcatattattcaaatatataggtggtacttttgaaacaattacattggttctcttggtttaactgaggtttatgaatattcaaacctttgctgggggaaagaaatgaaagttaatgagcatgcttgctatgagagagggatttttaatttaacttgtagttatagtttacttattgtttttagaattacttttacattttcccaactagatggcctagagtccaacattaccttttgagatgacattattgtctccataattgagtgatagctttaaaaaaaagattagttttgcttaagaagttatgttacaactgatcagccctatatgaattaactgatcagccctatatgaaacataagttgtgttataacttatcagccgtatatggaacataaatagtttctacctgcttgttagagaagctttaatttggttctaataaatacagtatggtagtgtttataggaatccaggatgttgaagaaatggcataatgtctatattttggaaacagaaaggaaaagtcacttaagatagtattaagtaattaaattcctatgtcagttgccaaatcttttaaacttatgtattcaccaagcccaaaaatagattgtggctcccaggattccaattttaattggagagctaagtaagtaaagttttataactgttaggtttcttaatgatcatattttgcagttttagtaaaagggaaatattgttatacatttattaaatatacttcccccatgaagtgaaaaggttaattttgctgaatgttttaagttgaagttacttcatggatgtcatacccatgaagtgcatttggatgagatagaagaaattgttttttaaaaagtttaagtaccaaaggtagtctagtctagaacgataagttaatacgtgttggcttttctaatttgtactgtaacatccttatactttctattttaagtatatctgtttcttaagtaaacaacttagatattttccacaccttttttttttttttctgatgcagagttcaggttaatattttactgcatctgataatgtattatacgtttgaagcctagtgacttttcattttgacattcttgtgatttcatatgctgtattcttcaagcaataaaattgtgatgtgttttaaaaaaaaaaaaaaaaaaaccaaaacacacacgacaacaaaacaccagaagaaaaagcaaagttcacaaaaaaaaaggggggcgaaattatacaggggaccaacacccccatttaagagggccaaagaataaaaagacggggaaacagggaaagtcggttgaacctttggtagccccaaacggaagg

SEQ ID NO: 8111 - DNA, 2933 bp, Homo sapiens
ttgaaatcaggaaatcaggccgggcgcagtggctcatgcctgtaagcccagcactttgggaggcggaggcgggtggatccattgaggtcaggagctcaagaccagcctggtcaacatggtgaaaccccgtctctactaaaaatacaaaaaaaaaattagctgggcgtgttggcgggagcctgtagtcccagctacacgggaggctaaggtgggagaattgcttgaacccgggaggcggaggttgcagtgagctgagattgcaccattgcactccagcctgggcgacagagcaagactctctcaaaaaaaaaaaaaaagaaagaaagaaatcagaaaatcgaccacagtggtagccacctggcctaatgctgtgtttttgtacctgacaggggtcactcattttaggcacaactccttcattctttgtgaaattagtgagtttccttctacccgtcaccagattcaatatgttctattaatacaccgataaccacaggggaagggcacttgtcgctctcccacctggttaccacagtctccatgggtcttttgccgtgaccacaaataaaggaaacactcatcactagtatctaagtcgggctttacagtaactatgcaccttctgtgtgcttcacctcactctctacttcaaacagcccatggagggaggtattattatactccttatgttgacagtgaagaatctgaggcccagagaggttggggacttgagtaaagtcacacagccctgagaggcaggaccagggttccattcctgctctatccagttccaagcccttgtgttttccattatgtttagtgcctctttgctaacagcaacatctgcaagatttgtgttggttttgatggagaactctagctcatccacatgctagtgcccaagtggtggaggggccacctcagcaggtgggttctgaatgcagccaaggctgtccccgcaatgggtgagactcgctccaactgcccgccctcagagcaggtgcctaagtcctccctggcactggcaggccttacctcacattgctaaattaaagcaatgcaattcctcttgggtaagaggaattcctccttctttactaactgatccccagcaaggaaataaaatgttaggctttaaaaatccctactttgtcatatcagactatattctaaaactatatttgagcgaaacctgtcattgcgtctaatttcaaatatacagaatctccttaagagctgttgccttatttttttgtaaagcctctctgacatcaaatggggagaaatggtggcacctccagacaccctgaaactacacaccatttcttccctgctcagcttctgctcaggagttctgtgagctatgggaaggccattggttgtatttgctacttttactttcatcttcctctgctgtagagccatttaatgttattgtcatatgctgctggtgaggtaaaggtgggtccgggtgccttcccaggggttagaggatgttcaaagggccgatttcagcaggagttcagagggcttatgatggatggtgagagatttgacaaccaccagagcacatgtgctctgaccctctcctgggcattggttcctgctggtaccgggcggttcagaccttcaaataggttgctttcaaaagagctttcaggcacttattgagaattaatgtttaaacagacataatagcctagatgaactcccaagagatctattaaatcttgtgggctgaataaatatctcgtgcaggactgtgcaacagtagcccagagcatcctgcctgtgggcatccacctcccaggtgagggcagtgggaagctggcccgacggcagccagaacttgtttctcacctcccaccagcaaccccccacccaactctgggccccaggcacacgaagcacaagtctcaggggaccattcccacattgggggatcctgagggagcccatcaccgcctcttgcatacaactgtccactaggaggcacgcccagtgtgggagagatgtatggtcttgccttccacctgtaaaaactgcacatatgcaagccatttgcactctggaactgcatgccgtgaaaactcctaatggtgtggaacttagtttgaatttgaaatcacgccgcatgcacaaagggacaggcccaggcccgacctcaggtcatccgcccgctggctgcagagcatccctgggagccaaggcgaggcccgtggagcctgagctttgtgtagctcgagctttgtgtagctcgtgcacttattatgcaccacctcccttcagtcaccactcctcttcctccgccatcctcatttatactgattgcacaccccccgctcaaacaacaatgtccttattatgatgaccatctcgtagtggtacattccattcctatttaaggtaagcccaaagcccacttttggattttctcgactgtccgagaaaagttgtgtaagcgcctgcgttcttctgggtttggctagatagggttgtgtccctctatggaatggagagtgatgtgggcaagggtgtcattttctcgcacaatacaactcactgaggatgcttctgtagaagtgagaaacacgatgagtacattcagaattacaataactcactctcactgggtaacttctcatgatagatttgtatgatcaatacgggtctatttttatgtcaactgaacactgtagggtaccttccagtctttttcaagattgttaaattgagacaagtaattgaataatttgtcctatttttattttaaaaaaagtgaatggactgaaatgttaaatgtgaatgtacatttcttaattgcaacttttctactgagtgtttgcactatactttctggaatcttatttaacaaaaataaagggaaaaaattgcttgactaaaaaaaaaaaaaaaaaaaaaaaaaaaagcgg

SEQ ID NO: 8112 - DNA, 1911 bp, Homo sapiens
  misc_feature (1910)..(1910): n is a, c, g, or t
taaacaagtaaactattatggtttccattgcttacaaaatgattttcctttacattcttatcatgaacactattttaagcatcaaatgcaatcatctaaaatataaaggtcaatcatttataatagaaacaccttgaccacaagcccttgattgaacattttataatatttcatctacttattaaaacaaataatttcccttgggttggaggggaagtgatttcataaattaattagaaagccatctttagcatattgcttatgtctggatccatgtttctgaggaaaaagacattctcaggtgatgtatttttttcatgcattagtatgcatttttaaaaaataatgcatgtttctttaataattaattttcatcttctataagatgccatgtgaagaagttgtggaaatgtagaataaaaagctaaagctgccaaatttctgttgaactcttaaaaacagctcatgtttgtttgtcctctcgggttgtggcctagcctatttgcaatgtaatgaagctgcagggttcttgtatagctaaagcgttcaatgcatttcacgtgctgtggtggatgtgggtgctgtagacaggcttcttctcttcctgctctcaaaatacctcggcttgacatttggacagatcctgtcattgtttaagctgagcaaaaaaccacacaaaagttgtgtaagagatgagataacaaaggagcgagagaaatctcatgtgaatttccaagttttaattcgttctccatgaaggattttcatttcagtgaaagtcgcagcagaagagggaactttctggagtttttgagaatgccaaaccacatttttatcacacttctttggaaatcaatgcctttgcatagaaaatcaaattcagggaccacaaagaattttcagtgggaatgtctagtctgaggggtctgaggttgtttttactttattgtgttgtttaaatattttaaaaatatctttagcgtttggtcttttttttttctgtaaacatttaatttggtctgagaaaagctgaatgtttgggtgtgacgtttgactgaggtggattggggctgcctgtggacattagtgaacaggtggtaggcttcaggaatatccagttttaatcagttgcatttggtacagaattttgagtaatggtgaaaattgttgtctttggaaagcacaaaagaaacctggaaaggcagttcggctcaggtagctacacataacattgtgtatgattttcacttcaaagctgtctggaaggaaatgcagtcagctccagctagtactatttatgtacccagataactaagatattgtttcatggccttgccttagtcagaggcccttttctctgtcctgaacccccaggtatgggtgaaattggaaattactaatctattggaaatcagttcctgacatagtaaagtttgctttcataactgcagcaaaaaaggtcaacttgccaagtcactgctgccatgtgtgtactgtattattttcagaaaaaaatataatagtctgagtccaagttatcttgatttaaaattgatagagaaaagaaactgtcgagcaagttatataacaactaacaacattgcactttctgtatatgaaatcaatatttaaataacttatttttctccattgctgttcttaaaaacattgtaagtagctgtaatataccagtaccaatatgttcttgcaattgcttcagcccaagaaagctgtgtattgttttaaaaattgtaaaaattattgtgatgattcatttagcataaagagaggtggacggaagggttttcctatgtatcaaaacttgtctataattatgtcatctatgtacctagaaaaaagtaaataaatttcttcagttgaatatgaaaaaaaaaaaacctataaaagant

SEQ ID NO: 8113 - DNA, 921 bp, Homo sapiens
  misc_feature (28)..(28): n is a, c, g, or t
  misc_feature (39)..(39): n is a, c, g, or t
  misc_feature (133)..(133): n is a, c, g, or t
gcacgagggatgtctgtgtcagaagcanccgtccctggngaggaagtaggaagagtgaaagctaaagatccagacattggagaaaatgcttagtcacatacaatattgttgatggagatggtatggaatcatntgaaatcacaacggactatgaaacacaggagggggtgataaagctgaaaaaggtgagttagggtaaggaatcagacgtgtcagtggtatggcctgctctgccaaggcaacactgcaagaaacagggaggcgacggttaagaaatgagaatttgcgaaaccaggggctgacctgactttgtagttgagctctgagctctggaagatcacagaattgtattcctttctgttactgcagagaagctgacaaaggggctggtgatacctgcctgagattgctagttagttcttaaatgttttccgatggagggaagcacagttctcccatggagggaaggacaatgagataaatctagattttgaagaagcagccctgagcatgcatggaattccccccttagctctgccacactgaatctgttagataagctgttcagaactcttactgtttcaacattcaagattcactgcattgctggaccctctgtgaaactgaagccttctctacttgtttttatctcaagtgaacctggagaagcaacaataatggaccttctcccctagtcaaatagcctgtggacctcccctcatagtcagtctccaaaaacatgtatctggaattaatttattacaaagagaagtttagtgtttcttcttttttacatgcgctcaatactgactactggccagacacagcaccatcctcttacaaacatcatttcatttacttttcacaaaaactaacaaagaataaataaataatataaaaataaaaaaaaaaaaaaaaaaa

SEQ ID NO: 8114 - DNA, 6290 bp, Homo sapiens
  misc_feature (28)..(50): n is a, c, g, or t
tacggctgcgagaagacgacagaagggnnnnnnnnnnnnnnnnnnnnnnncggatcgggccgtgtccgccgcggccctgcgaggtccgagggactcattctgatgaaggaaagagcgtccctgtgcagctgcgtgtccttcagttctttggctctgattccgtgtctggcttcatctaagtggcctggtccatgggcagtgaagaaatgtaaagtgcaatagccctctggaacaagacaattcatgtgagataagaaagaagagcccacaagaccaaggatgtattctcagtttacagaccactgaccagaggccactccagggtgtcaggactaagagaagtcacaaaacagcagatttcccaagagcagcggaaaatgatccagtcacagatatcatttgaggatgtggctgtggatttcacgctggaggaatggcagctacttaatcctactcagaagaacttgtacagagatgtgatgttggagaactatagcaatctggttttcttggaagtctggctagataatcccaaaatgtggctccgagataatcaagacaaccttaaaagtatggagagaggccataaatatgatgtttttggaaaaatatttaattcaagcataaacattgttcatgtaggactgcgatcccataaatgtggcacaggagaaaaaagtttgaaatgtccttttgatttgcttattccaaaaaataattgtgaaagaaagaaaattgatgaactcaataagaaattattgttctgtatcaaacctggcagaacccatggtgggataaaatactgtgattgcagtacatgtagaaaatccagcaacgaagagccatggctcactgctaatcacataacacacacaggagtctatttatgcatggaatgtggcagattttttaacaagaagtcacaacttgttatacaccagagaactcatacaggagagaagccctatcaatgcagtgagtgtggaaaagccttttcacagaagtcactgctcacggttcatcaaagaactcactcaggagaaaaaccgcatgggtgcagcgaatgtcagaaagcttttagtaggaagtcactcctcattttacatcagagaattcatactggagagaagccgtatggatgcagtgaatgtggaaaagccttcagtaggaagtcgcagcttaaaagacatcagataacgcacacaatagagaaaccctacagttgcagtgagtgtgggaaagcattctcccagaaattaaaactcatcacacatcagagagcgcacacaggagagaaaccctatccatgtagtcactgtggaaaagccttcttttggaagtcgcagctgattactcatcagaggacccacacagggaagaaaccttacggatgtggtgagtgtcaaaaagccttcagcaggaactcacttctcattaggcatcagaggattcatacaggagagaagccctacgaatgcaacgaatgtggtgaagccttcatcagaaaaccacagctgattaaacatcagataactcacacaggagagaagaactatcgatgcagtgattgtgaggaggccttctttaagaagtcagagttaataagacatcaaaaaattcacttaggagagaaaccatatggatgcattcaatgtgggaaaaccttctttgggaagtcccagctcctaacgcatcacagaacacacactggggagaagccttatgaatgcagtgagtgtgggaaggccttcacccagaagtcaagcctgatatcacatcagagaacacatacaggtgagaaaccctatgaatgcagtgaatgcaggaaaaccttcagtgagaagtcaagtctcattcatcatcagagaacccatactggagaaaagccctttgaatgtagtgaatgtaggaaagcttttgcctggaagccacagcttcttaggcatcagagaattcatacaggggagaaaccctatgaatgcagtgagtgtgggaaagcatttgttcagaaagtgcagctcattaagcatcaaagaaatcacacaggagagaaaacctatggatgcagcgattgtgcaaaagctttctttgagaaggcacagctgattatacatcagagaattcatacaggagagagaccatataaatgtggtgaatgtgggaaatctttcacaagaaagtcacaccttatgaggcatcagaggattcatacaggagataaatactatggatgcaatgagtgtgggaccaccttcaacaggaagtcgcagcttatgatacatcagagaaatcatataatataaaaatcatgactttggcgaatgcagaaaggttgctatcaagtgtcatactttctgacacttttgaggatgcatgtgggagagaaaccctattgaggcagtgactgttgaaaaagcttgaattgaggagtcaagagtcactaagcagaatttagaaagagaagtttttaaaaagcaaacagtgtaaaaaaagtcatctcccagaagacactactcgttacatattggatgactcattgaggtgaaaaccttattagtgttgtgatagtagagaagcttttagtcaaaagtcagtttattaaatgtttagaatacctaaacaggaagaaaattctattgttttttataacaaagtggaagatttcaagaaaggacaactcactgtacacttgagaataatacctacagaggttcatactgaagagtagtctcaataatgtaaagaatttgacaagcatgatgctattgaaatagttctgtaaggaagtggtgttctttatacatcaattattacaaaaagcagtgaattgtaagtgtgaggtgtgtttacttagatgtgaagagttctccttactgctgtgatggaataacaagggtcagatttcctctcctgccttaaacaactggaagctatacaatacgtataataggtaatggtttttagacataggacaagcacaggtttgtgatcctcaggagactgcagacagagtgaggtgagcaccatggtttctcagcctgcccccgcacggcagttcctaggttgcagttcagggaagggaaacaataaatctcgctgaattgaagagacaggactggcagttggggaggccacagcagctagaatttccaggggaaagtactggagagatgggatccttctagatacagggctcaagaagtctgctgggagtcccctgagtcctttgacttagtactgacttgcactgaggccaggaaaagaagcactggaaagcagcaggctgaacaattcctggaactcatgcagggctgggaatagtttatgttctcagcagccagagtggaaacagagtggaaacacatggagcatcaggtagaattctcagaaaggttttgttttagtagtgcagctaattaactctagattaaaagctactctggacctacagtgtccggcatccaaaaaaactaatgtgttatgcaaagaagcaataaaatatgacttataaccaggagaaaaatcagtagaaacccagaaaagacagaggtgatggaattagtagacaaggatattaaaagagctattgtaaatataaagtagaggaaaacataagattgatgaaacctgaggtataagagatatttttactggccaaaatggaacttctagggatgaaatcaacttctgattttgttaaaatcccgagtggagagattagatacagaaaaagaagaaaaaatcaatgaacttgaagagtaagaataaaaactaccaaagtgatatacagagagaaaaaaagacttagagaagaggaagagaataggaaaaccattacagtagtgtaatatatgtttaactggagtcccagaaggagaggagaaaatgaagaggcatgaagaagtatttgaataaataatggctaaagattttccaaatctggtgaaaacaatacccccacatattcaagaagctcaaatgacctgaagtagaataaacataatttacatcacagcagtgcacctcagagtcacattcatgaaaagcactgataaacagaatacttttaaaacaccttgagaaaaaaagataatacatacacatgaacaaagaatggcagcatatttctggtgagaactatgcaagctataagacaatggagtattatctctaaattccttaatgaaataaacaacaaaccctgcaacctagaattctgttactgtcaaaaacgttttcaaaaatgaaggcaaaataaagactgtttctgagaaactaaatcaaaggtaattttattacctgtagacctgtctttgggaaacattaaaggatgtttgagggcagcaggaaaataatacaaaacttaagtttgggtctgtacaaaggaatgaagttctgaaaatggtgaatatgtgggtaaatataaaagatatttctctctttttaaaatctttttaaaagggaattggctgcttaaagccaaagtaatgataacgtatttggagtttatttagaagtaaagtgtgatgacgataacacttaagtgtgaatttttaaatatagttgagtagactgcatcatctgagttagaagcctattccttcagggctcggggtagcttgaatttgtagcaggcacatgacagaaattgtatgtattgtggatctgcatgtgtgctgagtattccctatttctttgatcccttttcccccattttctgctctgctcccccctgaggctgtcttctagagactggggtttcttcataggtttgaacagtgggagataccagaggtgggaggagaaaaagttatttattaccgttcccttcctcctgcctggaccatggtagcttctgtgttcccgtaaggatacagcttcctttgggaagccccatctatggctgtagatctctcggtttcagttgacaccattccctctccatgatcttcagacttaactactactgggtgcttccccaacccactggttgggtgtctttaattgtgaacacatatttgtaaatagtgcctttattaattgttcttgagttaatattctgagtgtgccatttattttctgtgccatctgttaaatgatgagcatttaataaaattgtgataatcagttatcagtacaagtgccgcatagtgcataggctgaaatgtctcaagattccccacactacatatcagtattttctatctgtatctggacaatgcagtagaaattataacaaatacaaagttctttgtgcttttctgctgcatatgtcagtggctctggagattgttaccatctgctacatatataaatagacttgcagttattactaagctcctcttcagtaatagaaagacttatgaagtcttttactacctctgggttagccaaacaaccttcaaaaagcattgttatttaggttaaatatctgtggacaagaaacaagataatcagttactgagtgaagaaagacgggaatgatgtcccatacttcccagctctctaaagtgttatgctgtacaattaaaatacccctgacccatcatctgctaccattcgttgtggataattcatgtaatctctaacctgtgggcaagtctttacccttcagtagtcaagattacgttagagacttcgtccacgaatccacaccacctttcccatcagttctcaccggaaatatgctgccaaaaagaaaatcagcttttctaagatcaagccagagttgcttctcttacaaccttacggcgctaatgcattaagttgaagtcgactgccaaagaggcccagcagagggcagcacccccatcatttttttgaatttctcccttaggaattttgccttcctttgtcttctgtccaccaggccttctctccagctggacacaaacctcctttgacgggaaataattgccgttaggcttcacagtagtgctttttcctttcacttggatttgcattttaacctgcatttcgaagatttttatacatgttttctatttccgacaatgccaggaggcttcattgacgttgtagtctgtgttaataaacttgtgtatcactctgctctgatcttttaggaattaacttgcaaatgaaatgaatatgttgggactttggcataatttgaatatagcattgtgtgagttgtgattgtctcttcctaattgtgctgtaataacctgtgtatgagaataaaatgatttccaccatcaaaaaaaaaaaaaaaaaaaaaaaaaaaaaaaaaaaaaaaaaaaaaaaaaaaaaaaaaaaaaaaaaaaaaaaaa

SEQ ID NO: 8115 - DNA, 4424 bp, Homo sapiens
ttcactgaggggacccgccagtttcaaactcagtggcgtttgccctgattcccggggcctggctttcagcgtagcaattctgccggcgaagaaggtgagcgcagtgctgtgtggcagcagagctccttaggacgaggagcagcgggacgaggaagggcagactggtgaaatcgcaaactgggcgtctgttccggcgccggacccctatttgcaaaggtccatggctaatgaaacacagaaggttggtgccatccattttccttttcccttcacaccctattccatccaggaagacttcatggcagagctgtaccgggttttggaggctggcaagattgggatatttgagagtccaactggcactgggaagtccttaagtcttatttgtggggccctctcttggctccgtgactttgaacagaagaagcgtgaagaagaggcacgactccttgaaactggaactggccccttacatgatgagaaagatgaatccctgtgtctgtcttcttcctgcgaaggggctgcaggcaccccgaggcctgctggagaaccggcctgggttactcagtttgtgcagaagaaagaagagagggacctggtggaccgactaaaggcggagcaggccaggaggaagcagcgagaagaacgcctgcagcagctgcagcacagggtgcagctcaagtatgcagccaagcgcctgaggcaggaagaagaagaaagagagaatctcctccgcctcagcagggagatgctagagacaggcccggaggctgagcggctggagcagctggagtctggggaggaggagctggtcctcgccgaatacgagagtgatgaggagaaaaaggtggcgagcagggcgccttctgatgccacctccagccgccatccaccagacgccagcttccccgctgccctgaacttcctccagcgcaccaggccttcctctgtcctgtctgaggatttgctcatgcaacgtgctgtggccaaacaccctgccctcctcccttggcagatgtcttcctctcctttaaggcctggctcagagtggatgaggatgaggatgacctggaggaagaacacataactaagatttattactgtagtcggacacactcccagctggcccagtttgtgcatgaggtgaagaagagcccctttggcaaggatgttcggctggtctcccttggctcccggcagaacctttgtgtaaatgaagacgtgaaaagcctaggttctgtgcagcttatcaacgaccgctgcgtggacatgcagagaagcagagaagaagaaaggagctgaggaggagaagccaaagaggaggaggcaggagaagcaggcagcctgccccttctacaaccacgagcagatgggccttctccgggatgaggccctggcagaggtgaaggacatggagcagctgctggcccttgggaaggaggcccgggcctgtccctattacgggagccgccttgccatccctgcagcccagctggtggtgctgccctatcagatgctgctgcatgcggccactcggcaggccgcgggcatccggctgcaggaccaggtggtgatcatcgacgaggcgcacaacctgatcgacaccatcacgggcatgcacagcgtggaggtcagcggctcccagctctgccaggcccattcccagctgctgcagtacgtggagcgatacgggaagcgtttgaaggccaagaacctgatgtacctgaagcagatcctgtatttgctggagaaattcgtggctgtgctaggggggaacattaagcaaaatcccaatacacagagtctgtcacagacagggacggagctgaagaccatcaacgactttctcttccagagccagatcgacaacatcaacctgttcaaggtgcagcgatactgtgagaagagcatgatcagcagaaagctctttggattcactgaacggtacggagcagtgttctcatcccgggagcagcccaaactggctgggtttcagcaattcctgcagagcctgcagcccaggacgactgaagctcttgcagcccctgcagacgagagtcaggccagcaccctgcgaccagcttctccactgatgcacattgaaggcttcctggcagctctcactacggccaaccaggacggcagggtcatcctgagccgccaaggcagcctcagtcagagcaccctgaagtttttgctcctgaatccagctgtgcactttgcccaagtggtgaaggaatgccgggcagtggtcattgcggggggtaccatgcagccggtgtctgacttccggcagcagctgctggcctgtgccggggtggaagctgagcgcgtggtggagttttcctgtgttttcggcccctccctggctcttaccaggtcacgtgatccctccagacaacatcctgcccttgtcatctgcagcgggatctccaaccagccgctggaattcacgttccagaaaagagagctgcctcagatgatggacgaggtgggtcgcattctctgtaacctgtgcggtgtggttcctggaggggtggtctgtttcttcccctcctacgagtacctgcgccaggtccatgcccactgggagaagggtggcctgctgggccgtctggctgccaggaagaagatattccaggaacctaagagcgcacaccaggtggagcaggtgctgctggcatattccaggtgcatccaggcctgtggccaggagagaggccaggtgacaggggccctgctcctctctgtggttggaggaaagatgagtgaagggatcaacttctctgacaacctaggccggtgtgtggtgatggtgggcatgcccttccccaacatcaggtctgcagagctgcaggagaagatggcctacttggatcaaaccctccccagagcccccggccaggcacccccagggaaggctctggtggagaacctgtgcatgaaggccgtcaaccagtccataggcagggccatcaggcaccagaaggattttgccagcatagtgctcctggaccagcgatatgcccggccccctgtcctggccaagctgccggcctggatccgagcccgtgtggaggtcaaagctacctttggccccgccattgctgctgtgcagaaggtcagtcctacctttttctttctgagagcctccccaccccgagatcacatttctcactgccttctgtctgcccagtttcaccgggagaagtcggcctcttcctgatgggcaaccacaccactgcctggcgccgtgcccttcctttgtcctgcccgctggagacagtgtttgtcgtgggcgtggtctgcggggatcctgttacaaaggtgaaacccaggaggagagtgtggagtccagagcgctgccaggacccaggcacaggcgttagctcccgtaggagaaaatgggggaatcctgaatgaacagtgggtcctggctgtccttggggcgttccagggcagctcccctcctggaatagaatctttctttccatcctgcatggctgagagccaggcttccttcctggtctccgcaggaggctgtggcagctgtggcatccactgtggcatctccgtcctgcccaccttcttaagaggcgagatggagcaggcccatctgcctctgccctttctagccaaggttatagctgccctggactgctcactctctggtctcaatttaaaatgatccatggccacagggctcctgcccaggggcttgtcaccttcccctcctccttcctgagtcactccttcagtagaaggccctgctccctatcctgccccacagccctgcctggatttgtatccttggcttcgtgccagttcctccaagtctatggcacctccctccctctcaaccacttgagcaaactccaagacaccttctaccccaacaccagcaattatgccaagggccattaggctctcaacatgactatagagaccccgtgtcatcacggagacctttgttcctgtgggaaaatatccctcccacctgcaacagctgcccctgctgactgcgcctgtcttctccctctgaccccagagaaaggggctgtggtcagctgggatcttctgccaccatcagggacaaacgggggcaggaggaaagtcactgatgcccagatgtttgcatcctgcacagctacaggtccttaaataaaagtgtgctgttggttaaaaaaaaaaaaaaaaaaaaacccctttggagaggcccgttacccattaccgcccatagtgatacaaattccaatccactgacacccggttgaaaccgccgtgactggaaatccctggggtcccccatttaaaacgcgtgtgagaaataacatcttcgccacgtgggtaataacaaaaaggcccaacccgacggcctaccgacatgtcagcctgttcgattagtgggacgccttatgtttgct

SEQ ID NO: 8116 - DNA, 1360 bp, Homo sapiens
  misc_feature (27)..(28): n is a, c, g, or t
  misc_feature (76)..(76): n is a, c, g, or t
  misc_feature (149)..(149): n is a, c, g, or t
  misc_feature (180)..(180): n is a, c, g, or t
  misc_feature (208)..(211): n is a, c, g, or t
aagtgtcggaaccgccagcaaggcaanngatagcttgggcactgttgaacggacccaagattccgaaggctccttnaaactggaggatcctaccgaggtgacccccaggattgagcttctttaatcccgtctgtgccaccccccaatancaagatcctgaaagagatgtgcgatgtggancagtgctgtcaaagaaagactcccccannnntccctccccttttgacctcccagagtgaaacatgtagcaacagaataccaagaaaacaaggctccagggaagaaaaagaaacgggctctggccagcaacaccagcttcttctctggctgctcccctatcgaagaagaggcccactgaagttggagtcatcatctctacccccagtctggcttgggagatgctttcaggttgcagccagaaggggttttttaaatgacttctctggatttcaggtttcttgctgttgaaaaaaggaacaaagcgttactgaaaagaaggtaacctttgttggatgtgggccttagcctccaggtccagactactactctatgttctccagaagggtgctaagtcacctactgaagagagaaccaactgactttcctattgactcatcaggaaccagtcctcagtctggtcaagttgtttcttatttgtgagcagttcaggctatctcctgatggggatgaggccaaggctttcttatcttttggttgtctctgcttaatggaggagcctggcctaggatggaggcctggcttagatctttcattccacctcaggaatgaggttgtgatctttcctgtcctgaccctctctgaattatgtttcaatagtactcttgattgtctgccatgttgttgaagcaaatgaattatttttaaatgttaagtaagtaaataaaccttagcccgtctacaaaaaaaaaaaaaaaaaaaaaaaaaaaaaatttgggggggcgacttaggcgccaccagagaaacagcgtttatcaataagacccatcacggaaggggccgcgcggggcgcccaaggaaggagagaaggagagaacacatgggcaaacggagcggaggacaccaagagagagaaacaccgggggaagaacagagaaagagcgcgggtagggaattctcccacaaccaaaaaacaacaaacaaacgcgccgcgggggcgggaaaaacccggagcggcgctcctagggaacgaaagactctccagaaaagagagaggcatctcgggggagggacaaaaaagggggggacaatataaaaccgaaaagggagagcctcacaacaggccgacagcgcccggacgataaaccaaaggatcgaagcccccggagcccggggggcgcag

SEQ ID NO: 8117 - DNA, 3404 bp, Homo sapiens
  misc_feature (3309)..(3309): n is a, c, g, or t
  misc_feature (3356)..(3376): n is a, c, g, or t
ctttgtactcgtgttgtgtccattgtgtgtgtgcgtggggacagaggcctggaaatgcggaggactatacagagaaggcaggttttgtgaaggccaggcagggttggaggccgggggtgtgagaggagaggcccatagggctgagtggggtcgggtgaggcagaggtcagaaacagaagagctgcagttgctggagctgggctgagaactgggctgcctcctgccacccccccgtctcctccccttctccccttggtgcccccctctgctcagaatctgaagtagttccctcctcagcaatttcatctcttgaacactgactcacaccttttaggcacctactgtgtgcatagcattccaccaggactcatctcccttccttctcagggggtcccgagccccgactagctttgccctaactccttcatcaaaagaccccccgccagcttcccacacctcatacgcagccacatctgccctattctccatgctttccagcttgcctgcccttcctcatctctccctgcctgtgcagacctccacccttctttcctccacccctccatcccccaatgcttgtagaccttccattcattccgtctcatcgtgcgtggtctctgatcgtccatcacctgaccttctccaggactgtcttctcacccttccccactccctggtccccgggagcagctccttctgcccgactcactcacagtgcagggaaaggaggcagggaaaagaccaggattctgtgagttctgaggttgccacacacaaagaagctgtggtttctctgcctcggccactgatgagactaaaactggcttccccttggagacggcagatttcaggctgatccctgcttaagccctctcatccccacgctggtcctggtattgatacaagacccagctggtgacaaagcctccaatcctgggggtccacgagcctgggcctgacattcccagaactaccgccagtggcgccaggcccccacagtctgtggccgtggtcttagcccccagttccactctggatgggcctgtgacaccccaaagagaagaaggggactctggatagggtccccacatccagggcgtggggagaccattggcatttgggaaccattttccttcgaacggcttccccttgagctgagcattctgcttgctgcagtagacgggtcgccttttgcccataccgaaattttctgaaattaaatcgcacacccccaccatttcctctccctgggatctggaggaacatcatacatagtaggtgaatcgttttgtagagtgaagaatgctaatgtaaagcaaatagtcacccacgttccttgtaaatccaaatgtttctatattgtagctttgcttaaaatggggtcggccccaactgcatcctcctctttggcgggctggggagcggcccccagccgggacgggagggcagcgaccccgaggcctcgtggacgtgggagagagtgtggtgggaagtcttgagcggaggaggggatctgcccttctccactcctctcttggatccgcctcggtttcctgtccccccaccacccgcctgccccgcggaagaccgcccagtgagccagcccccaccttccaggcgccttcgccctggggatccaaccaacttgtatcgagtgggcggggcaacggctccccatttttcccgagccccgcccacagagctcttagccaatcctatgcagagagcatctcctggcaggggtctcttcccaaccagaccccacccaggcacattagcgaccaggcttgggcttccccagcgccccaccaccaccacgtgcaggtggagctctgggatgctatgttggggcggcaagcggtgggccgagggccgggtaggctagcacgggaggtaagggtggtatgggatggggcgggggcggtctagggcaataggagagcagagaatgggggaacttgagggtggggggagggcaccggagccttgccaccatcccaggactttgggcaagtcacccgcactccctgggcctcggtttccccatctgtaaaatgatggtaataatacttcacctacctcataggggaggttgtgaggccaccatcacctgacctgggggtcaaggcaggaggactccgaaggtgctacccgtgagcaaagtgtaattaccgaatcctgactgcaaggcccacctgcccctcccccacagagcctccagagctagctgaggccaacgcaggcccatccgtctcttcactctgtcgcaggccctttcatgggcttcgtctgccatctttgtgggtgccctagacttagtccttatcttgtcctggtttcctttcttgtgaccatctccccatgaaagtgctgtacaaattccacccgccccaggacccccgcacctgccctctggcaccagatgccagggaagggacagaggaaaacagccacaaacaagccaggggggctccccggagccccaggggtggggattggtggccactgtttgtatgttcttgagtgcaagtgttttataaaaaataaaacaaaaacccaccatcacaaaaaaaaaaattttgcagcgaagagaaatgaagaaaaactgaagaaaaaaaaaaaacaggaaaaaaagaaccatacaaaatttttccaccacacataccctctaagccagcaagatttcctctttgcaaaatcatatttttgtgggaatgggccctgctttttgtggcaaggcctgttctgattaataaaggatcgtgaaaaagtaaaaaaaaaaaaaaatatccaccaaaatatttcacaaccacaaaactttccaaccacccctcctatccgccgcccccctccccatctccttttagccgtcgcttctccttttgcggccgcccgccccggaggtttgatagtgtccttggtcccccgtcgctttatcccaaacaaggatgccataaaattagcagtccgtacccccctgaaaccgtccccattccgtatcagcccctccctccctccgcgtttaccttcctctctcgcccccacctcgtctgttcttccgcacgaccctcccaactacctcgccttatttccccgcccccccccgacagtgtatagatgaactcccaacgcggggtcggtgcgaggttattcccagttgggcgctggcttatggctggcacttcgccgcgctctttccgttataccactcattgatctcccctttttttatgccacctgcgcatccgtgttaccgccgcaatcaacttcatcgaactctctagcctatccaccgccgctacataactntcccaggcgcatgcggcacagattcatatctcatcactatcaactcnnnnnnnnnnnnnnnnnnnnnaccactctgggaccctaaggcctttggt

SEQ ID NO: 8118 - DNA, 2074 bp, Homo sapiens
agcggagggcctgaatacacagagcgctgagagagtggggcagtgtggtcacggacacaggcagggactgggatgtgacaggctggagctcagggacttgttgggggaatgggggtcagtgacaggctggaggcttaatgcgaggatggaggcttggctctaggggcagcacctggggtggtcatgggatctcagggaggggagtgggagtcagagaaagggtcttagagaagctggggctttgtgaggagctaagggagactcactgatcgaggtggggaccctaggggctgaatacacagagcgctgagagagtggggcagtgtggtcacggacacaggtcatgggggccttggcaggagcggttttggcagagggtggggccggtgcctctggaaggtatgaagatgtaaatgaagccctgtccaggctatgggcatcaagacagcattgccggcggctgagctgggcctctactctctggtgctgagtggggccctggcctatgctggccggggcctccttgaggcttcacaagatggggcccacaggaaggccttccgggagtctgtgcgacctggctgggagtacattggccggaagatggatgtggctgacttcgagtgggtgatgtggttcacctcctttcgcaacgtcatcatctttgccctctccggacatgtgctgtttgctaaactctgcacgatggttgccccaaagctccgctcctggatgtatgctgtgtacggggccttggctgtgatgggcacaatgggcccttggtacctgctgctgctgcttggtcactgtgtgggcctctatgtggcctcgcttttgggccagccctggctctgtcttggccttggcttggccagcctggcctccttcaagatggaccccctaatctcttggcagagcgggtttgtaacaggcacttttgatcttcaagaggtgctgtttcatgggggcagcagcttcacagtgctgcgttgcaccagctttgcactggagagctgtgcccaccctgaccgccactactccttagctgacctgctcaagtacaacttctacctgcccttcttcttcttcgggccaatcatgacctttgatcgcttccatgctcaggtgagccaggtggagccagtgagacgcgagggtgagctgtggcacatccgagcccaggcaggcctaagcgtggtggccatcatggccgtcgacatcttctttcacttcttctacatcctcactatccccagcgacctcaagttcgccaaccgcctcccagacagtgccctcgctggcctagcctattcaaacctggtgtatgactgggtgaaggcggccgtcctctttggtgttgtcaacactgtggcatgcctcgaccacctggacccaccccagcctcccaagtgcatcaccgcactctacgtctttgcggaaacgcactttgaccgtggcatcaacgactggctttgcaaatatgtgtataaccacattggtggggagcattccgctgtgatcccagagctggcagccacagtggccacatttgccatcaccacactgtggcttgggccttgtgacattgtctacctgtggtcattccttaactgctttggcctcaactttgagctctggatgcaaaaactggcagagtgggggcccctagcacgaattgaggcctctctgtcagtgcagatgtcccgtagggtccgggccctgtttggagccatgaacttctgggccatcatcatgtacaaccttgtgagcctgaacagcctcaaattcacagagctggttgcccggcgcctgctactcacagggttcccccagaccacgctgtccatcctgtttgtcacctactgtggcgtccagctggtaaaggagcgtgagcgaaccttggcactggaggaggagcagaagcaggacaaagagaagccggagtaggagggagcgggtagagggatgggctctgctcagctattcttgggccagatggggcctgaccgatagaataaaagacttttctacaacaaaaaaaaaaaaaaaaaaaaaaacaaaaaaaaaaaaaaaa

SEQ ID NO: 8119 - DNA, 8214 bp, Homo sapiens
  misc_feature (6839)..(6839): n is a, c, g, or t
ctgctctccctgagcccgctcccgagcgctgctttcccgccgcgggtgggcttcgcagcctcaggccagccgcggcccttggcccgctgcagccccggccctccaccttccccgtgcaggggcggcccggccagtgtcgctcatcccgggacgctcccttctcccacccaggactgccccgcggagctggcttggacacccaactttgccacctcgagggtcgtctctgctgggcgcgaacctgcccacccaccggttggccgcgcgctcggggaccgtgctcgtggcccccaagccggtgcccccattctggaactcagcgagtagggggcggctctggggaagtggcagggggcggctgcagctgctgcctccacttccctagccaggtgctgaagaggatcctcggagccgctctggcccccaggcgctggatgactggcaccagcgctcctcgcacctgtgttggtgtgtgagacttgggctggagtgcccacgtggctgtggagtcagtgtgattcatgattgaggaaacgcgtcctccatcctctctctccttggcactttccacacatgaggagaagaagagcttctgtttagaagacacgtgcccagagtcagaggccccttgcccaccatgaagggaacctgtgttatagcatggctgttctcaagcctggggctgtggagactcgcccacccagaggcccagggtacgactcagtgccagagaaccgagcatccagtcatctcctataaagaaattggcccctggttacgggagttcagagcgaagaatgctgcggatttctcgcagttaacatttgacccaggacagaaagaacttgttgtaggagcaagaaactacctcttcaggttacagcttgaggatctgtctcttatccaggctgtggaatgggagtgtgatgaagctaccaaaaaggcctgttacagcaaaggcaaatcaaaggaggaatgtcagaactacatccgggtgcttctggtgggtggcgaccggttattcacctgtgggaccaatgcattcacgcctgtctgcaccaaccgctcgttgagcaacctggctgagatccatgatcagatcagtggcatggcccgctgtccctacagtccccagcacaattccacagcgctcctcacagctggtggggagctctatgctgctacagccatggattttccaggacgtgatcctgccatttaccgaagcctaggcattttacctcctctccgcacggcgcagtacaactccaaatggctcaatgagccaaactttgtgtcatcttatgacatcggaaattttacctacttctttttccgagaaaatgcagtagagcatgactgtgggaaaacagtgttctccagagctgcccgggtgtgcaagaacgatattggtgggcgcttcctgctggaagacacctggaccacattcatgaaggctcgcctgaactgctcccgtcctggggaagtccccttttactacaacgaattgcagagtactttcttcctgcctgagctggatttgatctatggcatctttaccaccaatgtgaacagcattgcggcctcagctgtgtgcgtcttcaacctgagcgccatcgcgcaggccttctctgggcccttcaagtaccaagaaaactcgcgctcggcctggctaccgtatcccaacccaaacccccacttccagtgtggcaccgtggaccagggcctgtacgtgaacctgaccgagagaaatctgcaggatgctcagaagttcattctggtgcatgaggtggtacagccagtgaccacagtgccctccttcatggaggacaatagccgcttttcccacgtggcagtcgacgtggtgcagggcagagaagcgctcgtccacatcatctatttggccacagattacggaaccattaagaaagtgcgggtacccctgaatcagacctcaagcagctgtttgctggaagagattgagctcttccctgagaggcggagggagcccatcaggagcctgcagatcctgcacagccagagtgtcctgttcgtggggctgcgggagcacgtggtcaagatccccctgaagaggtgccagttctaccgcacacgcagcacctgcattggggcccaggacccttactgtggctgggatgtggtaatgaagaaatgcacaagcctggaggagagcctgagcatgacgcagtgggaacagagcatctctgcgtgtccgaccaggaatctcaccgtggatgggcactttggtgtgtggtctccgtggacgccttgcacgcacacagatggcagcgccgtgggatcctgcctctgtcgaacccgctcctgcgacagcccggccccgcagtgtggtggctggcagtgcgagggccctggcatggagatcgccaactgttccaggaacggaggctggactccctggacctcgtggtctccctgcagcactacctgtgggatcggcttccaggtgcggcagcgctcctgcagcaaccccactcccaggcacgggggccgggtgtgcgtgggacagaaccgcgaggaaagatactgcaatgaacatttgctatgtcccccacacatgttctggacaggctggggtccttgggaacggtgcacagcccaatgcgggggtggcattcaagctcgccgcaggatctgtgagaatgggcctgactgtgcaggctgcaatgtggagtaccagtcttgcaacaccaacccgtgtcctgagctgaagaagaccacgccctggacaccctggacacctgtcaacatctctgacaacggcgaccactatgagcaacgattccgatacacatgcaaagcccgcctggctgatccgaatttgctggaagtgggaagacagagaatcgaaatgcggtactgttctagcgacggcaccagtggctgctccacagatgggctttctggggatttcctgcgtgctgggagatactctgcccacacggtcaacggggcttggtcagcctggacgtcgtggtcacagtgcagccgtgactgcagcaggggcattcggaaccggaagcgtgtttgcaacaaccccgaacccaagtatgggggaatgccttgccttggcccatctctggaataccaggaatgcaacactttgccctgcccagtggatggcgtgtggtcttgctggtccccctggacaaaatgttcagcaacatgcggcggtggacactatatgaggacccgctcttgctccaatccagccccggcctatggaggggacatctgcctggggctgcacacagaagaggcactctgcaacacgcagccctgcccagagagctggtcggagtggtcggactggtctgagtgtgaagcctctggcgtccaagtccgcgcccgccagtgcatcctcctgttccccatgggcagccagtgctccgggaacaccacggagagccggccgtgtgtgtttgactctaatttcatcccagaagtatctgtggcaagatccagtagcgtagaagagaaaaggtgtggagagttcaacatgttccacatgatcgccgtggggctgagcagctccatcctcggctgcctcctcaccctgctcgtctatacttactgccagcggtaccagcagcaatcccacgatgcgactgtcatccaccccgtctcacctgccccccttaataccagcataaccaaccacatcaacaaactggacaagtacgactcggtggaggccatcaaggcatttaacaaaaacaacttgatcctagaggaaagaaacaaatacttcaacccacatctcactgggaagacctattctaatgcctactttacagatctcaataattatgatgagtactaacagctttcatgttttgggcttcttgtaaatccccagttcctcaaggcctgtgccccatgactgcccatgtttctgaggcttcagagtcgaagtttggatacatttcaagtgcatttcaagccaccagagtgtcccattggtgccaaaaatacacgtctttaaaagcaacaaaaattgaaataagacatcgtgaaaatcttgaccattgttgattgagccagggtggtgaagtttttaattggtgttcatcctatttttctgacaagtccattggtttgttttttgagcattattttataaatgtgccacccacattggaaggagtctttctttagaactttggagtgtaaatcttcatgatgttgtaaattcaagaaaataggcactttctctgaaagacctgctccttccacaagaagtgcataggtccataatatttcataaaatgaagaaaaagaatgtggccaaacaattattcaccatggattgcccaactttccaaatctggataaagctgtgggattcttggaagcagcttgagtgttttcatcttgcctgggaagcccaggaattccacctggtccacaccggcagaagttacagtagactgtgaggcaccccaccttgctcctgatgcagtttctgcccattgctggtgcctggtggaggcagcggagcagaggctcaggcacaatgaagcgtggatgtgttctgcaggttgctgcaaaactcaccttattctgacttttggatttcatggcattccaggaagctccttgccatgctgttggcctggaagtccacctgtctggtccatagtgacgtcctgaagagccagtctgtaaaataaccaaccacttacttagcgtttggatagactccatgccttctctctccctgcaaagaaaaatcttgaacatttatgatgtcaattagtgaaagtattgaaaatactaaattataactaaaagcaactttttatgttattgaaaatattgaaagaactgatattaatgataatcattttatttttcatctctctgatatacccaatgtgtggcaatcagcccctaccatgagcattaatgccatgtaaagctggctttctggagtctgccaggtccacacgaagtgctacccccagtttctgctgttacttgctgcctccaggccaggggagcaggagatgctcagctctggtgccttttcttttatttcagtgctgccttcccacccacccagtccattcaccctcacctctccctgcatggaggcaacagcatttccaagatgtaccttgggaagtcaggatagctggaagtaagggtttttggggatccctgtggtctcttcactgatcatcgataagcatttaagagtgtgctaacaccattcacagaggtccctggaaaaaaatatataattttctcacaaacaaccaatacataacctatggcagttggttgaataattattgaaaaaaagaacacgactgaaaaagttcatctgatgcctctgagcatgtgataaagtcctgggtagacatggaaacgtgttcttacaaatgaaccttcggatctatgaaagaaaatatagtagggggactaaggaacatagaattttattagcatatgtgattttacccttatctttgtttctaatttaaagaaacaatttcagaaagtgttagaagaattctatgtttaataatgaatattgttgagttcaaaatattctcatatacccagatttacagagatgacacagtattgaaatggcaggtgggctctgtaagttatttggggattaatgaaatccagggtcttggcaggggggactcaatgtggccctctcactcatccctcatatgtcaagagtccttcctgtcttatatgcacatgctccaaggtccatactcagtagggggaaatctagccggatggttccccaattgttcctcggctggattttcatcatcagaaatttccaactcatctcatcagttttcttgtaagaaaaaaacatttttcactttgtagcacaattttagttatttttgagtcttcttccctaatagtttgtaagcttaaagggacaattttaattttcccctggttaaagagggattctaatatttccaagaatgttttccactggaattgatgggaaatggtttctaaatggcatcgaagctggtctttaatgatcttttgcaatgacttgggaaaaacaccctccctcactacaggatcttcatgttgttaataatataaacaaacctttgaaattagcattgcaaaagaatcccatttttgtttcgtaccacactgttcaaaggaaaattgtttatctctcttcctttctctctctctcttatttgacagaatagcaagtgtttagataatttcagatatattcctaagtattttaccagctgtggaataagttgtgtttgtccatcactgtgtagctaccgttcacatgttctggctctgtactccacgcttatcgcgtgaaccctcacatgttggactttcacagtgtgatctctcacctgtcttggaaactccttcataaagccgctcttccttaggcctgggctgtttggaagtcctggtgaaactttgcggttcacattttaaattcctgaatgaccttttcattctctctttctttatctttgtttttgtccttcattccctccttttgttcttccttcctgcctttcacgtcacctacttatccgactatttcctccatttgcttcttttctatttgccatcacctgtgacccgagtggaacaaaaaccaacacatagttttaagctacacctttctgcacctgatgtaaaatgacattaatccactatttaacttctaaaattatttctgaatacagttgcagataggctggttttcatgaggaagctcgcttggctttagtcttacatttaaattctttgaaagtggcttccantgctattcagggtcctttcttgaggccagactcatcaccatctactattgattttacagtgcactgacagtttacaggaaggagaagaacagaatttctgcacactacacaacatgtgggcttcctgtagctccagggacatgtagctttggtgaaactggggttttgtaacctctgaatgatatggacttagtgaattctaaggaactcagggggcacgtggtcaggctccaccgcacagaagagccacagtctccagactcatggcgttccctccagaactccccattcccctctgagcatatttctatgctgctgcttcttgtgacttacatgaggcatctcagcttcttcatgtttgtagggatggttccctaagcctgttcaagtaggctctcactagagttaccattcatatttgagaagaaaagaacatttattaaatgtatgtgtggggctgaggttctaaaggaattgaaaagagacgataaacattgaatgagggtgagggcatccctgctggggagaaacctctgtcccctaggaagagtccgttcatgtcatgtggtttgggatgaaccaggggtctgcccccatcgggtcacaggtgatgccaaatagaaaagaagcaaatggaggaaatagtcggataagtaggtgacgtgaaaggcaggacctggtcaccccagcaagtgctatggacagttcccggaaacggttgcccacttcacaggtccatgggtctgacccttggactctgccaggatcaactgcccagagtgccagagttttagccaaaggtgtacttacttccttatttatctccaaaaggatggaaactgtgggagtcaaagcctattttgctgagtgttcccactggatcctctgtagaattagcaggtcatgctgtcaaaatcatggacaaaggctgggtgcagtggctcatgcctataatcccagcactttgggaggccaaggtgggcggatcacctgagctcaggagtttaagaccagcctgggcaacatggggaaactccatctctacaaaatatacaaaatattagccagccatcgtggtgcgtgcctgtggtcccagtttcttgggaggctgaggcgggagtatcatttgagccaggaggttgaggttgcagtgagctgagatcacatcactgcactccatcctgggtgacagagagagaccctgtctcaaaaaaaaaaaaacagtctcgcgggggctcacacccacggcctccggggcacacgacaggaaaagggagacacacatacaacggtaacgacaggcagcaaaaaggcgggggaaaaacacgcggcacacacaggcaagatggtgaggcaatgaaaacacagcgtagcc

SEQ ID NO: 8120 - DNA, 5285 bp, Homo sapiens
  misc_feature (3419)..(3439): n is a, c, g, or t
  misc_feature (4272)..(4292): n is a, c, g, or t
cacgggggaagcaggcgggccccccagcacccgggaggccgagctgaagctgcggctaaagctggtggaggaggaagccaacatcttgggccggaagatcgtggagctggaggtggagaaccgtggcctcaaggcagagatggaggacacgcggggccagcaggagcgggagggcccgggtcgggaccacgcacccagcattcctacctcacccttcggtgactccctggagtcctccactgagctccgccgccacctgcagtttgtagaagaggaagcggagttgctccggaggtccatctccgagatcgaagaccacaaccggcaactgacccacgagctcagcaagtttaagtttgagcctccccgggagccgggctggctaggagagggtgcaagtcctggtgccgggggtggggcccccctgcaggaggagctgaagtcagccaggctgcagatcagcgagctcagcggcaaggtgctcaaactgcagcacgagaaccacgcgctgctgtccaacatccagcgctgcgacctggcagcccacctggggctgcgtgcccccagtccccgggacagcgatgccgagagtgatgcgggcaagaaggagagtgatggggaggagagccgcctgccccagcccaagcgggaagggcctgttggcggggagagtgactcggaggagatgtttgagaagacgtcgggcttcgggagcgggaagccatcggaggccagcgagccatgccccacggagctcctgaaggcccgggaggactctgagtacctagtgaccctaaaacacgaggcccagcggctagagcggacggtggagcgcctcatcacggacaccgacagcttcctccatgatgcggggctgcggggtggtgcgcccttaccggggcctggcctccagggcgaagaggagcagggtgagggggaccagcaggagccccagctgctggggaccatcaacgccaagatgaaggctttcaagaaagagctgcaggccttcctggagcaggtgaaccgcattggggatggcctatcccccttgccccacctcacagagtcctctagcttcctctccactgtgacttccgtgtcccgggactcccccatcgggaacctggggaaggagctgggcccagacttgcagtccagactgaaagagcagctggagtggcagctcgggccggcccgaggggacgagcgggagagcctgcgcctccgagccgcgcgggagctgcaccgccgcgcagacggggacaccgggagccacgggctgggaggccagacctgcttcagcctggagatggaggaggagcacctctatgccttgaggtggaaagaactggaaatgcacagcctggctttgcaaaacaccctccatgagcgaacctggagtgatgagaagaatctgatgcagcaggagctccggtccttgaagcagaacattttcctcttctacgtcaaactcaggtggctgctgaaacactggcggcaagggaagcagatggaggaggaaggagaggagttcactgagggtgaacatccagagaccctctccaggctcggggagcttggagtccaggggggtcaccaggcggatggcccagaccacgacagtgaccgaggctgtggctttccagtgggggagcactccccacactcccgggtgcagattggagatcacagcttgcggctgcagaccgcggacaggggacagccccacaaacaggtggtggaaaaccagcagctgttcagcgccttcaaggccttgctggaggacttccgtgcggagctgcgggaggatgagcgtgcccgactacggctgcagcagcaatatgccagcgacaaggcggcctgggacgtggagtgggccgtgctcaagtgccgtctggaacagctggaagagaagactgagaacaagttgggagaactaggctcctccgctgagagcaagggggccttgaagaaggagagagaggtgcaccagaagctcctggcagacagtcacagcctggtcatggacctgcgctggcagatccatcacagcgagaagaactggaaccgggagaaggtggaacttctcgaccgcctggacagagatcggcaggagtgggagcggcagaagaaggaattcttgtggaggatagagcagttgcagaaagagaacagtccccggagaggtggcagtttcctctgtgatcaaaaagacggcaacgttcgcccctttccccaccagggaagcctccgcatgccccgtccagtggccatgtggccttgtgcagatgctgactccatcccgtttgaagaccggccgctgtccaagctgaaggagtcggacaggtgctcggccagtgagaatctctacctggatgccttgtccctggatgacgagccagaagagccaccagcccacaggcccgagagggagttcaggaaccgcctccctgaggaagaagaaaatcacaaaggaaatcttcaaagggcggtgtccgtgtcctccatgtctgagttccagcgtctaatggacatctcccccttcctgcctgagaagggcctgccgtccaccagcagcaaggaggatgtcaccccacccctgtctccagacgacctcaagtacatcgaggagttcaacaagagctgggactacacacccaacaggggccacaatggtggggggccggacctttgggccgacaggaccgaggtggggcgggcagggcacgaggacagcacagagcctttccccgactcctcctggtacctaaccacaagtgtcaccatgaccacggacaccatgaccagcccagagcactgccagaagcagccactgcggagccacgtcctcaccgagcagtcggggttgcgcgtgttacacagcccgcctgccgtgcgcagggtcgacagcatcacggcggcaggtggtgagggtccctttcccacaagcagagccagagggagcccgggagacaccaaggggggccctccagaacccatgctcagcaggtggccttgcacctcccccaggcactcccgggactatgtggagggggcacggcgcccccttgatagtcccctctgtacctccctggggtttgcctccccactgcacagcctggagatgtccaagaacttgagtgatgacatgaaggaggtggccttctctgtcaggaatgccatctgctccggccctggcgagctgcaagtcaaggacatggcctgccagaccaatgggtcccggacgatggggacccagactgttcagaccatcagtgtgggcttgcagactgaagccctgcgtggcagcggtgtcaccagcagcccccacaagtgtctcactccaaaggctgggggcggtgctacacccgtgtcgtctccttcccggagccttaggagcagacaggtggcccctnnnnnnnnnnnnnnnnnnnnngccaagtttgaacgcacatgctgctcccccaagtatggttctcccaagctgcagaggaagcccctccccaaagccgaccagccaaataacaggacgtcaccagggatggcccagaaagggtacagtgagtcagcctgggcccgctccaccaccacaagggagagccccgtgcacaccaccattaatgatggcctctccagcctcttcaacatcattgaccacagccccggggtgcaggaccccttccagaaggggctgcgggccggcagtcggtctcgctcagcagagccccgaccagagctgggcccaggccaggaaacaggcaccaattcccgaggaaggtcgcctagccccattggggtggggtcagagatgtgcagggaggaagggggagagggcacgccagtgaagcaggacttatctgctccccctggctacaccctcactgagaacgtggcccggatcctcaacaagaagctgctggaacatgccttaaaggaggagaggaggcaggctgcccacgggcccccgggtctccacagtgacagccactcgctgggggacacagccgagccagggcccatggagaaccaaactgtcttgctaactgccccctggggactctagccctgcctgcctcacgctgaactaccttgttctgcactagctccatccctagagccctgcttctccaggcccgagagaccagcaaaccgtcgccctccgtcccgttgggccccacattcccccactgcctcacagcctcagtcacccggagacccgacgtccttggaggagcatggtggcgaggagccgcccgaggagcagccacnnnnnnnnnnnnnnnnnnnnngattatcacagtataattcactgtaatttgcataaccacaccatcaccatgaacaaaactctgcccaacaggagagatctagttttctcaaggtcaaagaatgttttttaaaaacacaaagctgctgaatgttcaacctgtgaaactgagatgtttctagaatgaaacagtaaatgtgcctgtaataacttaatttttttcatagctcagaaaactatttttgtctccatcttttttacacacagtatattaaacgaaaacgtaaataaggtataaatagatttaaaaaataaaagttttaaaaaatgtacattttaagagattctgaacaccctcgctgtcaatacctgactgcctctgttaaatttgcactgttacattttggttcagtttatttccatgttgaattagagtggattaagttaattttattttgtcagtgttactgttttttatgaattttttaatgcttcagactgtctgattcagtgaactttttgtagtgaaaaagccatgaagccagtagacaagacagatattctgtatgctggaggggatacaggatgattttgaaaaggtacaaagtcctcagtgggcttagaaaattcactgtatgatccttatattatcctacttggcttgcacgtcttcgggtgcatgtatataccgctactgtgtcctcgccatcacctaaatgtgactcagtctgttccactgtaatatgttgtgaatttccttgtactgtacttttattgttggtcttcttgcatcgatgatccaacagcaacaccatttttaaattattgtgaaaagattaactggcaatgtacagagtttactcaaagttttcttaagggaaaacactacaaaaagtcacaaggataccaaatggaaacacatgatgatgcctctgggtctgtatgagaccgtgatgaagtagaaataaagcccttctgagatggcaaaaaaaaaaaaaaaaaaaaaaaaaaacgg

SEQ ID NO: 8121 - DNA, 6231 bp, Homo sapiens
  misc_feature (2032)..(2032): n is a, c, g, or t
  misc_feature (2183)..(2200): n is a, c, g, or t
  misc_feature (5040)..(5069): n is a, c, g, or t
  misc_feature (5760)..(5760): n is a, c, g, or t
  misc_feature (5794)..(5794): n is a, c, g, or t
gccagcttgatacagatgatgatacttatccatgattcccatttacaccggcctggatgcttttcagatatcagattttttgggaactattttgataaatatttttaaaggttgatggagccccctgggagtgtagggtgaattgggtgcccctccccttttctttttgggtgtatcaaagcatataatcaatggacaggaaaagtgaaaggttttttatgagagttttgcattaaaagaaaaccaacgatcaagtttctacactgcagcactgttgatatttgagcaagacaactcttcgtggtcgggggctgcgcttgcactgtaggatgtttaacggcgtccatgacctctacgcactagatgctggtagcttcccttccccggctgcgacaaccaaaagttgccattgcattgccaaatgtctcctggggggcaaaatcgagcactggttgagaagcgctgttttcaaaaacatcctcctgcccccatcattgtcttggtgtgctttttaccattttattaagatagaccagatggtcaacttcccaacaccaaatgcacatgtatgccagcatatatgcgtgtctctttgcaggtatctgcatgttcctggagctgagatggaattccacggtcactggaggacgttagttcagttcctcagcaagtttaaggtcaatatatcagtaccgtaataaaaaagcctgtctgtattcaagctgtttcttttcctccagcagaaaccatcgtcaatatttgcagtcagtttttgaagtcactttcttttaaagctggaaagaatcttcacccaggcccaccctcatcttaatccactatttagagtcctacttgaatgatatcgccagcaactttcaactttggatccagatttctttatttgtatccaccaggaagagaggtaccacgtttctgagttcttttatgagcactcgctatgtaatttgcaaggcccagtgcgaagtgaaaacgcaggccccttgttcaaaaattgttaagaatttcaagacatcaacagcagagcattaaatcaggcttagggcccttctgaactcctgggctctgggcatacccatgacaccagacctggcagtcttggttggtgctgcattgattttgttgtattaatttaattggcactgccatctcttttgcccctgtatcgcagtgtttcctgtggtgaggaccccaataataaaatactgtgacctcaatcagtttaagagaatgcaaattacactgcagcaaatttttacagcatacattttttagactttcaaaaaaaaaaattcacacgggaatcttttctacatcattatagtaattaaacacggtggcctttcaccatatacatattttcctgtaaatatgacaacctggaactagtaactgctactatccacaatgcttttaagttagccaagagtgagacttccacaacaaaattatgacataatctctcatgtccttataaaaatagccaaacataccctaaatggcttactgtgaaaatttgagtagtaacttcttaatattgaaaaacattattttcatggaaatattgtccttctactaagtgttttatgttaacatcataaggcaaactgtagcatttattggtacctggagaccgtgattttaaaaactcagaagctgagttttagacccttttatttagaacctgttagtgtacaaagtgcattaaaatatccattatccagttacccaaaatgtatgtaaaaattactgagacaaccctttcagtttactcagagaaggcaaacacacattgcttttatattgtaataaaaagaaaaacctataaggtttccagagaaagattgttttttttccattgaggcgtccatcttttagatgtgaaattgtcttaggtatctatcaaaatattcatactgggtataaataatatagtaaatatatagaatcctatctgttaagaaaaaggagagtgtctgctagggaagaggatggaaggacccaggaagctggnttggcctcccttgaaatccagatttgcaatcacatgacctttggccacgtgatgctgaaacaatgagttcattgacttatttcagggaggcagttggttgatttggttaaaaacaaaataactaaaaacaatgtctaaatccactagtctnnnnnnnnnnnnnnnnnnacccagtatcccaggtaaatattttagcaattgaaaccatttatagaggtcatgcccttcatcaaactagaaccaatgccagagttctgggccaagaactgctcaagaaagccttaattcatggaccattccaacgcatcagattggcatgcaaagaatcccagctgacattttataagcaggttcctgaataacgagtttgaattttttttttttttttttttggtcttacaactctattgtaaactatactagactatagagggacttctacatctttcaagatgtgtttaataaaggtctgtttataataacttttgaggcatgaatctagcaaatagtactttatacaatgtcccttgtcattaccaactcataaatattaagtgtttttcagtgacttatgtttggatgtggtagtgctgatcagggccatgtgctgatgtcctggagagcaaaatcaatccaaagtggtgctgctatttgtgacagaacatgtttatttactcagccccggagacaaaaggaaaattgatatgggggagcgggaaataggagaactattaaatgtagtgaagaaatttcacaggtctaaaggaactattaaaaggaaggataaagtagattctatactataaaacagaatcctacctctgataaaagacaaatcagcctgaatttttgaataatcaataggattcaaaatgactattttcaattgcaatctcattcttaatgttcttccagaacccttaaccctgagagaagcagggcaaaatgtggccaaaggattcagaacctttctttccaacattatcccatcagctatgagaaggtaaagatttagccacggcaaggtccgaggtccaaaatcaactcttttcattctctgtcttgctctccattttagttgatctgatacaactttttgacatcacaattaaaacacttcaaattaaaccagagtaagaaagcctgtttcctcccctactaggttcaaacacatcctgttatgcaccatcgaggtgagaagacctaccatgggatcatcatgggatatcaggtaagaagatgagtaacatacaaaactacaaaagtttttgtttttttgtaagcccacagattgtgatgaaatgaaggttgtaaatagctgataaacttatgggcctcttaatgtgcaaaaccaagtaattcctaaaagttgtaatcctgattatgtttctcttataaataatctatagattttcctctaaatacaaaaaaattaaagaaattattaaagcccgtacttaatacaagacacagtaaaaggagaggaatctcttgttttgagccctatctgagccgatttcgggacacttctggtgagatttcattacactcatgaagcctgtgctttctcagtcccctaaatagtggcctgaaccttactgttccccagaaagcagctccatgtggccagacgctcacggcagctgctctgtgcagtccaaatggtctgggatagggagcccagtgataatcgtcagacacttgttccacacggtgaaggtggggcaaacaggctgcgcaaatgcgacgtcgaaggtgtagaggtggatggagttcaaagcatcataaaaggcgatagagccgttatcatagtccagcaggatgcccacgcgccggaggtggggggcaggctcaatggggatttccttgctattgtgtctcaccacccagttattgttgcagcggcagagcgcccaggaagcagagttcttcccaatccattcatgcttcggggctgatttgtaagcaagaccaatggcataccatgtgcttccacttatgaccacttcccaataatgccggccactatcaataaacacatttccagctactccatagctcccctggctggtgaagcgttcaggtgtgtgactcttcttggatgatgactcatcacgttctactgtcaagttatcatgggacaccttcagttttcgatgagcagatttgggatccagtttaaatggttggctgtttgtcttcaacttcccaggctcactgctgcggctgcccgcctggttgatggccttgaccatgaagatgtacttggtgccgctctgcagaccgtgcaccgtgtagtggttctgcttgatgttgggtactatcatccagctatcagccgaattacacagactaacgacgttggcttgtccggtgaatatggtgtactggagctcgtaggagaccacgctgaactcatcatcggaggtccaatgcacagtgatggtgtcatatgaagctgtgcagagctcttctctaattgtgggagggttgggagctgtaaggtaatccagacattctagcagtttcttctctcgggaaaaatctaaggcaaaggtgtcaaatgtgtcattgaggttgatttcaggaattagaacctgggaggatgcagttgccatggagactctctcggtgatattcttagcagtctgtaggaaacgcgcatgatcattctccttcagagagtgttccgcttgggagatgagtgatgctgaccgctcaatgcactgtttgcagtttgcaatctgctgagccagtttgcgaagcctcatcaccttcccttctttgatcttggttccaataatctgtcgtctttgctgaatgatctcaatgagaagatcacactcctctgtcaatttggcttcttgacgtgatgcattgacttcaacatgttgacaggtttggatgagtttagccaaaagggtctccagttctgtgttcctcttaataaggttggtgaggttactctctaagttttgcttcaatttgtcatagcgctcactcaaagnnnnnnnnnnnnnnnnnnnnnnnnnnnnnnccagtttacacaaggcacagattaactggtcatcggtcacacagtacatattcaccttctcatcctcatgctccaagcacatcagcccccggatgtgagagtccggaattggctcaatcagacgatggcctgtaaagggcttcttattcgggtgagtggctttcaggcactcgtcacagtaggatacttcacaagtgacacaggtcttcacagcgtcctgggcaggatcctggtcacaaaactggcagaggaccttctcggcggaggtcatggtgttggcgtcaaaggcccgctcccgacgggtctcgctgggagagttgggcccgctcactgatgctttctggaacctgtcgatgatgttctgtagggtgacgttgcgcttgagcccgtctagacctcgctggctgagggtgatgacatgccggcaggtggggcactggaaggcggtgatggactccacagactcgttggtggcacagtgtgatactaggatgcggtgggcgcagttgaagcagaggctgtgtgcgcagggcagtagaagagggtcctcaaagagctccagacaaatagggcaggtcagttctgactccagtgtttccatcttcaggcaaagctctcttgtgtcatcagcaaaacccaaggaagctgatcagctatcaatggtctgttcactagttctttttggaagtcnggactccaagtgccagttccttcccagtgttcanccactgcgttgatcctccacgggggcctgccacacacggctctggcgaggcgtcccacctgggcaaatgcctacccgggagcgctctcaggatccgcgtcgctccggctggttggagtcccccgcagggatgttccacagggcaggctaaagccacctaaggagctgcctcaaccgtctgttaatcacctcgcttcctggtcagggaaccaagaaatgtagcaagacaagccgcagacaaaactcctcagacaccgagataaagaagaaagggtcgacgcggccgcaagcactggcagacttgtggcttaagagcggagccccccgaaaaagaaattcttggcctgtttaaaggcttacaactttaaggggtccatgtgaaagggtcgtgatagatcgatcagtgtgggattcgtgactcggtgctacttggatcag

SEQ ID NO: 8122 - DNA, 3961 bp, Homo sapiens
  misc_feature (114)..(114): n is a, c, g, or t
  misc_feature (142)..(156): n is a, c, g, or t
cctataaacccagcactttggcaggccgaagcaggaggattgcctgagctcaggagtccgagaccaccctgggcaacagagtgagaacctgtctacaaaaaatacaaaaattanctgggtgtggctgagtgcgcctgcagtnnnnnnnnnnnnnnnggctgaggcaggagaatcccttgaaactgcaggcagaggttgcagtgagccaagatttcactgctgcacctggggtgagactaccattaaggaaggaaatttcctttaaacagaaaaaaacaaaggtgctcatctatttcttctgaattctctctacatccttgacttaagaggccagcactcaagaaacagctttagccccagtgaatttgccattgaaagattaccctcccctttgccctcatctgcctgagctagaggccaggctgttgttaatgttttttcagttccaaagcccctgatgggacattcttgtttctgtgctactgctttctctctcttaaattaaggtgcaaggggataaatattactataactgggatgtaaggctcagtcagtgtggctattccctcccttcgggggaaatattccatctgtctgaacggttttaggtgatcatgaggagagcggcttagtcacacagccagccacgctcatcacaaaagatttgttcagactcactgtaaagaatgacaaggcagatagctaatcctttcactgtgcctcaaagcccgccgtgcaagtcaccaaccctaccggtcctctccacggtgcgaggctaatagagtgatcagaaccaggaatgtgagctgggttccaccttaggaggggacaatgaggacagagcaagagggctccatgtttaattactccaggctctgacttctgcccacaattacagagcatgaaagcagaattggcctttagtaagtgaaaaggaagtggctcctgcagcatataattgttataatttcgtatttatggaaagagaaaaggacttcagtccactcatgttgttaagcacttgtccctcactccactggagcccccttcctatgttttgggcacagatggctgggaccgagaggaaagaggaagagcggctgccagagtgtgaatatacccctcagggatatacagcggagtttcatgataaactacccatactttcccaaaaaaggttgaggagcaatacataactttgcagattacaaacccttgttttactttttaaaccttttttccatactctgcttattggaaatcgatggctgtgatgtgaccaacacctgtgatgatagcaaagcccctcctttcacagtctcctgactgttcggggaacctccttggtcattggtagaaagctttagaaaagacttagctttttagggaagaactaaaaaatctccaaaacatactagtcccatgacttcgataactgaaaatgtcctgggtgtaaactaacccaggaatgtggatcatacatgttttttttaaaaaaaatccctgaatcaatattttcctacaacacaccctaaaattcctatttttgtaattaatggttggacagtgatcagccatttaaacataggctttctggaataaccagacactagaatagtttccaaagtgttttgcgtatcaaaatcctatatacttagaagaagaactcaggataagaaaaaatcgctaggtcccaaagggttcatgactatcatcagatgcaactgcgagtggcctacggtcattttttcaaatgagaagactggagagagagaacaacagtaatcacaaaacctctgttgcccttagtccatgacaatgtttaaggaaactttaaaaaattaagccatcttctgaattgttttctacaccaaatctaaaatattaaaatgaaattattaaatatttaaaatggggtatttagtggaaatgcaatcagtagaaaacattgctttttagtgcctgctaaacaagtaaaggagaaagaatgaagagaaaacagcagtccttcctgtgtgacactcgtgtggaaatgacaggcattcacatgtcattgagtgctaactcaaaagctaggtggcaatgctgtccaatgtttagagatcttttgaaatataattttaccaccattcagaggtaagtacttgcttaacagaagtctttaatgttagtgaatgaatgtataaaattataaactatgcattttcaaagagtagcatgtattttgtatcgaatccaagtaaatttttttcatagctacctaccacaactgcaaattattcaaaataaacttggatacatatccttatggggatatgggaagcccatctatattctcctacttgatgtttttaaagagttgaaactttattctgaaacatcaggctctaaaaaaattcccatcattaagatgaataaatgggaaatggtttatttgttcttcgtaagcataaatgggaaatgttggctgttagaaaatgtgcccagttctttaaaggtggatgttctagtaacactggattaacaagcaaacaaaactgcatgaagtgaacgaatatttcattggataaagttagcataggttttatctgctgggtttaattctcaatcccagaaaaaaatattcttcaaggggtatcagttatagtttcaaagaacaaaatatgaaaatattgtccagcaaagcaaatcattgatcttttttcaaaattacttatattttggaaagtctatatagaatatccacaaatttcttcagccctcttgttgatttcatattttcatgaaactttttcccctaataatttgtcttcgctctttaatcagtgctttactacattactcagcctgaaaaaatatcttttccttcatctgacaatgtggaaataaagaactccatttctgtcattctggttctcttcagtgtccattgagaaagtttctcaactgtttgtaaaatacggggggaaaaaaacacgcatttctaaacctggtacttaaggttatactggattgtttgctacctaattagaagttattggggaaggggcattgtgtctttttatatgatttttagccaaatccagatgttctgatacacatttctgaatacctgtctgactgtaaatacagcctgtggaggttcaggttgataaacctttcacctgactgctccacagccatgctccttgccagcttctggcacattgtacatagatttgttgaatgtttaaatgatgttgtttttctaaatgctgttctctaaaacaattttttgaatttcttttgctttccattgttttggactttgtgtgttcgttttttaaaaaaaaaaatgtttcctaaatatttaacaccaggaaaaatatttttaaatacactggtgctaattgaaacagaaggaaattttcagatcgaagatgtacaatgttaaatgttcataccagttaaactgcactttcccaaggggacagctggcatctacttgaaatgggcatcaagagaccaccaaatgtttacagtttctgtggcccgtttaagtgtaaaatgcagaagtggctctgtccccccagagttaaggatttgctacactggtcctctggaagcatttaagtagaagaaaaggcttatagtcagaatcactttagtaatcgtcttctggtccttggacttttctgttctgtaatgcttgtaacaatgaatatggtgttgccaatctagtctgatatcattgttgacctgtacttactttgtggatggttctacctggggttgcactggcacaaacagagccagaacactggactttcaaaagaccattttgacttctacagtgtccacacacatgaatttaaatgcacttgtaactggttaattaccatgaagtaagtctaacttccacttaataaaagtttttgtgtatctgaaaaaaaaaaaaaaaaaaaaaaaaaaaaaaaaaagg

SEQ ID NO: 8123 - DNA, 4137 bp, Homo sapiens
  misc_feature (1416)..(1455): n is a, c, g, or t
  misc_feature (1480)..(1532): n is a, c, g, or t
  misc_feature (1586)..(1661): n is a, c, g, or t
  misc_feature (2783)..(2804): n is a, c, g, or t
agacaaagcggtcgccgcccccgcccggccccctggtctctgtctccgtccctcctcctttgctgcctctttccctcctcctctccctccctcctcccctccctccagtctccggatctccctcggtccctctctcctcctcttcctctctctggacgcccggctcctccgcaccccctcccccgggggtcccgcggcctgtgagttgactgaggggctcagacttggggagtgggtgtctcctcgcccctgtccttgctcccgtccctggcccggaccttggctgtctcctctttgtgccgagattgtcagtctgtgcggctacagcggggtggagacggccggctctgtcacggcttcatgagagcggggacggggcgcaggacttgcaggcgccggggagaagagacatggagccggcccttggcactctggggtcgcgtggggcagtcggtgggggaggcaggcggtggtgacaggacagggtgggggtggacgccagggttctgggaacgcgctggcagccctgacgcccgggttccgaaagtctcgggggtggctatttcccccgacccgcctcgggggcggagtgcggggcagaggggtgggggctggggagaggcgtggcccgagcggtgctggaagcggagccgggacctttggggcccgcgctgagacgcgcccggctgctgccgccgccctcctttcccctcttccctggtttcccttctcctctagacctgttcgctctccgcccctccttgcctccccaacaccccctcaggtcccgttgcctcctggtcctttcagggattcctggtccttccttcccacactagcctccctggggtatcgctgaggcagcctggcctgcacccaggttcccctcacccctgccacatttctctcttctccctcacgccaactttccttttcgcccttctctctctttctcacatcctagagacggtctttaatacgcattaaccctgtgctgccacatctggctcctgccctcattgcctccaatccggactcttcctctcacatcacccccaccacccccaacttgggctcacaacttctcttcactttttccatttccccagttctctgccttccgtctttccctctgtcctcatccttagcccctctgccctgctttgtgtcccacctctccccctccacttcctctcctcccaccctcagtctcacccccgggctgtctcactctctggagcctctccttcctgttctctgtccccagtgctccctaccctcacctcaagacgaccatggccaccatcccagactggaagctacagctgctagcccggcgccggcaggaggaggcgtccgttcgaggccgagagaaagcagaacgggagcgcctgtcccagatgccagcctggaaannnnnnnnnnnnnnnnnnnnnnnnnnnnnnnnnnnnnnnntcccctggggagcctagccctgtgnnnnnnnnnnnnnnnnnnnnnnnnnnnnnnnnnnnnnnnnnnnnnnnnnnnnnctgcggtccttctggaggccatcgggccagtgcaccagaaccgattcatccggnnnnnnnnnnnnnnnnnnnnnnnnnnnnnnnnnnnnnnnnnnnnnnnnnnnnnnnnnnnnnnnnnnnnnnnnnnnntggaggcccgggagcggagacccagccctggggagatgcgggatcagagccccaagggaagagagtcaagagaagagagactaagtccgagggagaccagagagaggaggctggggatagggggagcccaagagttgagcctgaggcctctggaggctcgggactggaggcaaagcccaggagaggtgggagacaggagctcccgactgtcagaggcatggaaatggaggctgagtcctggagaaactccagagcggagtctgagactagcagagtctcgagagcaaagccccaggagaaaagaggtggaaagtagactgagcccaggggaatctgcctaccagaagttgggcctgacagaggcccataaatggagacctgactccagagagtctcaggaacagagtttggtacaactggaggcaacagagtggaggctgaggtcaggagaagaaagacaagactactcggaagaatgtgggagaaaagaagagtggccagttccaggggtagctccaaaagagactgcagagctgtccgagaccctgacaagggaggcccaaggcaacagttccgcaggagtggaggcagcagagcagaggcctgtggaagatggcgagaggggcatgaagccaacagaagggtggaaatggaccctgaactccgggaaggctcgagaatggacacccagggacatagaggctcaaactcagaaaccagaacctccagagtcagcagagaagcttctggaatctcccggtgtggaggctggagaaggggaggctgagaaggaggaggcgggggctcagggcaggcctctgagagccctgcagaactgctgctctgtgccctcccccctcccaccagaggacgctgggactggaggcctgagacagcaggaagaggaagcagtggagctccagcccccaccaccagcccctctgtctcccccacccccagccccaactgccccccaacctcctggggatcccctcatgagccgcctgttctatggggtgaaggcagggccaggggtgggggccccccgccgcagtggacacaccttcaccgtcaacccccggcggtctgtgccccctgcgaccccagccaccccaacctctnnnnnnnnnnnnnnnnnnnnnntcccgggggctgggaagaagcggtacccaactgccgaggagatcttggttctggggggctacctccgtctcagccgcagctgccttgccaaggggtcccccgaaagacaccacaaacagcttaagatctccttcagcgagacagccctggagaccacgtaccaatacccctccgagagttcggtactggaggagctgggcccggagcctgaggtccccagtgcccccaaccctccagcagcccaacccgacgacgaagaggatgaggaagagctgctgctgctgcagccagagctccagggcgggctgcgcaccaaggccctgattgtggatgagtcctgccggcggtgaccatcttccaacatagggatatacctccctccttcttataactgaagatcctggagcccggaagattcagggcagacagaccctgataatgagcctggcagggaagggcaaccaacatcttgtaacttgctttccccaccctgtttctgggggcagagccaattgcccaatttctaccctaatccaaagtccctggtgtgggtggggttaaacgtgctggtgcatcctaggtcatccaagagtgagcgccaagtcctgagaaggggcacagaactccctggagggtggagatggagcacctgccccccatggcagggtacactctccccacagccttcctccccaccatcccgtggggactctcgggatttaagcactcgtctctctgggaggcccagaccccactccatttataggcacatctccttcatttcctaggtcactgcccctttgtttacagctcctgcctcctcccttgaccacagcctggtttacaaattccatcagctcccagccccacctgccaaagtcccaggtttacaagccacgcttacttgctgtgtctgcgtggaattctctcctctgtcccctccagtctcctcattggagtgacctgaaggtgtggcttcctccactttttctcagtattactttgccttagttttccccaagagggaaggctggaactcttaactctgtaccccttgatagttatttaattctgtttctcctagtggttcacaattgaactgaattgagatggtgtcgggtggctaaggagacacctcacctctccttccccattgtgccgcctttatcaattgcctgttttgttttgtttgttttttaactttccataataaaatggagttctcttcaaaaaaaaaaaaaaaaaaaaaaaaaaaaaaaaaaaaaaaaaaaaaaaaaaaaaaaaaaaaaaaaaaaaaaaaaaaaaaaaaaaaaaataaaaaaaaaaaaaaaaa

SEQ ID NO: 8124 - DNA, 1395 bp, Homo sapiens
gagacctcggttttgcacaagccggccttgaaatcagagcctttccagcaactccgagagcgtgtgctcggcgaccgcgggcttggccagcggcgcgcgctcggcgccccggcgcccccagccccacgcgcgccgggcgggcgccatggaggagggctccagctcgcccgtgtcccccgtggacagcctgggcaccagcgaggaggagctcgagaggcagcccaagcgcttcggccggaagcggcgctacagcaagaagtcgagcgaagatggcagcccgaccccgggcaagcgcggcaagaagggcagccccagcgcgcagtccttcgaggagctgcagagccagcgcatcctggccaacgtgcgcgagcgccagcgcacccagtcgctcaacgaggccttcgcggcgctgcgcaagatcatccccacgctgccctctgacaagctgagcaagatccagacgctcaagctggccgccaggtacatagacttcctctaccaggtcctgcagagcgacgagatggacaataagatgaccagctgcagctacgtggcccacgagcgcctcagctacgccttctccgtgtggcgcatggagggcgcgtggtccatgtccgcctcccactagcgccgcgccacccacctccggaccggcgcgccagggctgtccgtcgcgtcggcggcgcaagtggaattgggatgcattcgagtctgtaacttctgaaacctgaacaacctcaggaggcccccacctctgccctccaccagcgtcgagagaagggacagcagtgacatcggacagaagacccgggctcccgtcctcccccaggacggtccccacataggaagggcactcccagccctcttgctggtgacattgtcatggtcatcttgtttctgtttggatttttcttctgggtcttatgtttggggggaggtttattctttctgaaaatgtctagattcaggaacacatttatgaggatttggattttgaatttgtatttccctctaagtgccttttttaatgtctatttttttaataaaacagaaatgcattcttgtacaattctgttgaaactggaccaaggctctcagaagaggacccccgagttccttcccctcccccgagcctctgcatgattgtttcaagtcagcctggaattcttactttcacgccgctattcttttcctttctccgtgattgcttggctagccattttaaaaaaaatattctctgttcagtgtatatgttgcttgtttgttttatttattgagatatttttacaagctaagtgactgcagtgtggctgtgtatcctgctccccacccaggaaaaataaagacgtccgcgcagccatggacaaaaaaaaaaaaaaaaaaaaaaaaaaaaaa

SEQ ID NO: 8125 - DNA, 1585 bp, Homo sapiens
  misc_feature (177)..(186): n is a, c, g, or t
  misc_feature (198)..(203): n is a, c, g, or t
ctcggctggatttaaggttgccgctagccgcctgggaatttaagggacccacactaccttcccgaagttgaaggcaagcggtgattgtttgtagacggcgctttgtcatgggacctgtgcggttgggaatattgcttttcctttttttggccgtgcacgaggcttgggctgggatgnnnnnnnnnnaggacgatgacnnnnnncccggacgtttcaaatgcgaagtgtgtaagctgctgagcacagagctacaggcggaactgagtcgcaccggtcgatctcgagaggtgctggagctggggcaggtgctggatacaggcaagaggaagagacacgtgccttacagcgtttcagagacaaggctggaagaggccttagagaatttatgtgagcggatcctggactatagtgttcacgctgagcgcaagggctcactgagatatgccaagggtcagagtcagaccatggcaacactgaaaggcctagtgcagaagggggtgaaggtggatctggggatccctctggagctttgggatgagcccagcgtggaggtcacatacctcaagaagcagtgtgagaccatgttggaggagtttgaagacattgtgggagactggtacttccaccatcaggagcagcccctacaaaattttctctgtgaaggtcatgtgctcccagctgctgaaactgcatgtctacaggaaacttggactggaaaggagatcacagatggggaagagaaaacagaaggggaggaagagcaggaggaggaggaggaagaggaggaagaggaagggggagacaagatgaccaagacaggaagccaccccaaacttgaccgagaagatctttgacccttgcctttgagcccccaggaggggaagggatcatggagagccctctaaagcctgcactctccctgctccacagctttcagggtgtgtttatgagtgactccacccaagcttgtagctgttctctcccatctaacctcaggcaagatcctggtgaaacagcatgacatggcttctggggtggagggtgggggtggaggtcctgctcctagagatgaactctatccagccccttaattggcaggtgtatgtgctgacagtactgaaagctttcctctttaactgatcccacccccacccaaaagtcagcagtggcactggagctgtgggctttggggaagtcacttagctccttaaggtctgtttttagacccttccaaggaagaggccagaacggacattctctgcgatctatatacattgcctgtatccaggaggctacacaccagcaaaccgtgaaggagaatgggacactgggtcatggcctggagttgctgataatttaggtgggatagatacttggtctacttaagctcaatgtaacccagagcccaccatatagttttataggtgctcaattttctatatcgctattaaacttttttctttttttctaaaaaaaaaaaaaaaaaaaaaaaaaaaaaaaaaaaaaaaaaaaaaaaaaaaaaaaaaaaaaaaaaaaaaaaaaaaaaaaaaaaaaaaaaaaaaaaaaaaaaaaaaaggggggcgcg

SEQ ID NO: 8126 - DNA, 520 bp, Homo sapiens
tgagtgaacctaagataaacgaaatgagagagggtgttcaaggtcaggagtgatttttgcattggtgaaacctccaagtcagactcagtggcagaacatgcagcagaaaagctgtgaaggaaggaaatttacgtgattgtaatggaggctaggggtggattgggaggtgagtggaggagagtctctgaccagctgcaaagccaacccctatcattttattaacatggaacccacacagataggggagggattaagctaagaacttacagaatgcaaacacgagcacactctcttcgaacccaattgtgggtgtagcaatgaaagcaatatgatatgctgcagtgtgaagctccttctggggttatcgtatgtacaaagtttaccttataatggctcaaattgtatttaatttttttgttttgtttataaatgaagaaaagctataagtataatgtaattattttataggtatactattaaattatagaacaaataaagataatctaggattatatgtgaa

SEQ ID NO: 8127 - DNA, 3383 bp, Homo sapiens
  misc_feature (1521)..(1607): n is a, c, g, or t
ggtggtcacagtgctctgccagctgtggtaaaggggtgtggaaacggaccgtggcgtgcacggcaactcacaagggaaatgcgacgcatccacgaggccgagagccgaggaggcctgcgaggagtcccttgacctcatgtcagccccactcaggctgtcctgtctctgcagtgctcgtcgacctgcgggaagggcctgcagtcccgggtggtgcagtgcatgcacaaggtcacagggcgccacggcagcgagtgccccgccctctcgaagcctgccccctacagacagtgctaccaggaggtctgcaacgacaggatcaacgccaacaccatcacctccccccgccttgctgctctgacctacaaatgcacacgagaccagtggacggtatattgccgggtcatccgagaaaagaacctctgccaggacatgcggtggtaccagcgctgctgccagacctgcagggacttctatgcaaacaagatgcgccagccaccgccgaactcgtgacacgcagtcccaagggtcgctcaaagctcagactcaggtctgaaacccacccacccgcaagcctaccagccttgtggccacgcccccacccggctgccacaagaatccaactacatagaacatgagcgtggacttggcgtttgccattagtgcttccgtacttaatatattgttaacagccactggctggctttctacagtgaggagaaagtaggcatgagtcacaaagtaacttcaatttctaggatttcaggtacctcgaagggaagcacctctggcagacaaccgtcaagagagagacatcatttagtgttcttgtcttgactcgcttttgacatttgaatttccagtgcttggtatatcatggaggaaacatccccaaaacgagacatgctagaaaaggctttattctgaaagccggcgacaccatggagggaggggcaggtgttggtgagcctctgcccgtggcttctctggggagggccgggctgcttagcacacgtttctctccatctaccttcttgaccacatgagaaccaggacgttgcctccatgcccgtctctgagaacatagtctctaaatcctaggtgttgccttggaagtctcgtgcgtggagtgtaaatctatatatgccagcgaggacagcagtgccacgcagttcataccacccgcatgggaagaatgttccaagagagtctgggtttggggaagcatctaattttcagagctctgctgtccaccgtgtagggaaacagaagggcctctcttcaaggtgctgtgacataagaaacggtaattgcggtgatggggttgcttcctaaggcaaagagatgctgtaccacatcccagtggctttctaccgaccgtggccatttatctgaaggtaagacgacatttgggacctctgaggacacaagcccaggcctaggatctgtagagcaaggcctgactgctctatcctggcacggagcagcctgatgtgccaggaccaggggaggaacgccatctgnnnnnnnnnnnnnnnnnnnnnnnnnnnnnnnnnnnnnnnnnnnnnnnnnnnnnnnnnnnnnnnnnnnnnnnnnnnnnnnnnnnnnnntcttcttggtggggcaaggatgatgcatgatgaaggaaggtccttcccccctgcagcccccttacgcctggcagcagacaagcagagtggcctctttgagagcacagaggatggtagcaccctacctgcaaggaggccgggcagggaccctagatgccaggaggcctgttttgctcaccaacttggtgggcatttcatgggtgcttatgttctaggactttaccgtaaataacacctcctccctgatttcagacagaaggtctcacttggacttccatgggatcatctccctgtgtttcttgatttattggtgctgtgtttctgtgttttgttttgttacatgtcacaaccgtagagttagcttaaatcagaaagaagcctctctgccttctccaccctgtcttacgagctgtgtttttgtttttactaccctagaggcagagaagcggtagggatgtcagggaatttactcacttccacttgaatcaacgagaagtgttgagaaacttccgtgggtgctctgtggaaagaaccgagggtgtcaggatggagcggcccaccctcgccccgcggcctgcgcagactgctgtcctccccttcaggcctggccaccagcagactcccatgaattcccattttcacaaagccctcaaaattttgggggcgctgaggttcaattttcttcatccccaaatgaactgttaattcactgaaagacatttagacttttgcagccaaggagcagagccgggcaagctcactaaggaagccttagcttggtctcctgcatgggccccggggcctccagatatgcccacggtcaccctggcaagggccccacaccctcagaatgaaaaggattgattgggttattgtcagatacccccattagttcccctaaagtctgcatctgcagagctcttttagctcatctttttgttgtcggtgttgttttttgaggcagagtctccctctgttgcccaggctggagtgcagtggcgcgatctcagctcattgaaagctccgcctcccgggttcaggccattcttctgcctcaccctccccagtagctgggactacaggcgcccaccaccacgcccacctactttttttgtatttttactagagacggggtttcaccatgttagccaggatggtctcgatctcctgacctcatgatccacccgcctcagccttccaaagtgctgggattacaggagtgagccaccgcgcccggccttttagcttatcttgaaatccaccagcctaccttctgttcatggcacgagcagtgatttcagtgaagccatcataaacattcttgttccactagatgctgatcacagcagtgatgtttctgtgttaataccctgtactgtccctcgagtactgtacctttgtgcttgcacacgtgtcactaacgcacgtgttaccagagtctcacgaccctacggtgctatttttattggtgcaaaattaaaccctctcagctgaccgttgctggataggatcagaatgcaggaaaagagcctctatggcaatacgattgtccttttttcgtttcagagtcaaatgtatctattttccattcgttaacttgcattacatactgtacccatggaatttttgttttactttttggggctggttttgaaaggaaaaaaaacggaagacaaacattggacgccattatacatgaaaattatatagaaaaattaatcatttcattggaagcaagttgaatatgtgtaataaaatgtttttccataacagttt

SEQ ID NO: 8128 - DNA, 1622 bp, Homo sapiens
  misc_feature (495)..(506): n is a, c, g, or t
agcttttgaagatttaagctacgctatagtacttccctttgtctgtgccataagtgcttgaaaacgtaaggtttcctgtctggtttggtttttttaatatcaaaagagtcggtgtgaaccttggttgggaccccaagttcacaagatttttaaggtgatgagagcctgcagacattctgcctagatttactagcgtgtgccttttgcctgcttctctttgatttcacagaatattcattcagaagtcgcgttctgtagtgtggtggattcccactggctctggtccttccctgtggatcccgtcagtggtgctgctcagcggcttgcacgtagacttgctaggaagaaatgcagagccagcctgtgctgcccactttcagagttgaactctttaagcccttgtgagtgggcttcaccagctactgcaggggcattttgcatttgtctgtgtcaagaagttcaccttctcaagccagtgaaatacagacttaattnnnnnnnnnnnnacgaatttgtttatttcccattaggttttagtggagctacacattaatatgtatcgccttagagcaagagctgtgttccaggaaccagatcacgatttttagccatggaacaatatatcccatgggagaagacctttcagtgtgaactgttctatttttgtgttataatttaaacttcgatttcctcatagtcctttaagttgacatttctgcttactgctactggatttttgctgcagaaatatatcagtggcccacattaaacataccagttggatcatgataagcaaaatgaaagaaataatgattaagggaaaattaagtgactgtgttacactgcttctcccatgccagagaataaactctttcaagcatcatctttgaagagtcgtgtggtgtgaattggtttgtgtacattagaaatgtatgcacacatccatggacactcaggatatagttggcctaataatcggggcatgggtaaaacttatgaaaatttcctcatgctgaattgtaattttctcttacctgtaaagtaaaatttagatcaattccatgtctttgttaagtacagggatttaatatattttgaatataatgggtatgttctaaatttgaactttgagaggcaatactgttggaattatgtggattctaactcattttaacaaggtagcctgacctgcataagatcacttgaatgttaggtttcatagaactatactaatcttctcacaaaaggtctataaaatacagtcgttgaaaaaaattttgtatcaaaatgtttggaaaattagaagcttctccttaacctgtattgatactgacttgaattattttctaaaattaagagccgtatacctacctgtaagtcttttcacatatcatttaaacttttgtttgtattattactgatttacagcttagttattaatttttctttataagaatgccgtcgatgtgcatgcttttatgtttttcagaaaagggtgtgtttggatgaaagtaaaaaaaaaaataaaatctttcactgtctctaaaaaaaaaaaaaaaaaaattttttctataaagtcgatcttatatgatatggctaaatgtattttttgtgggtgtcct

SEQ ID NO: 8129 - DNA, 2094 bp, Homo sapiens
caaagtgacagatgtctgtgatgtttcatgacataggttatgatcgagccaatttacaaaatttaataaccaacctaaactcacatacatatttgttaagaagctgacatcagttcagtattgtaaggaaactaactaggtggtgatgatgataaaagaattagggaaaatattttatttgatatattcccttttataattcctaaaatgaagattctatttaagggttataatttatataagtttagtcatataccattacattatgataccataagcagagtgcattatgattctctagaaatataattcaatcagatatgtattatatttatttatgtcacacattttctttactgagaataaaaattatcttattttcagaagctttgtatcaatcagtttcatgtaataagcaacccagatatctactagattatgtatttcttcatttgaaactacactgttttctcctagtccccttgactctactgtgcttatccattctttcacagaaagaaagtaacaggcataattcctgttgatgaggctgggattgtttttaagaggagagataataacttcatatttttaaagtgccagtagcctaatatgtgaaacagatcagaatctgttgtgtagtaagtctgctttgttgaagaatttattatgggagtaaagataagaaggaaagagatcaccatcagaaacaagtcagccttttcatgcttttttgagcatttttggagatgattccacttctcaagttattatcatttgtgcatctcttcaatgctattgttaaatgctttagaattagaatattttgatcctttaattaaagtaagccaaacgtctaggcaaaaacagccaatcattaaactttaatagtaattcaaatatagatttctcatacagttttccatgtctgtagaaatcaaagttgtaatgttaagcagagggaaatgcgtgtgatttactaatacacttcaacgttctacttttgaaaggatactcatgtgggtggggcagagaacatagaaaaagatatgatggaaaacctgtccattttctacctgttaaccttcatcattttgtgcaggccctggaagcaaagagaggaagggaccgactgcatttatctttgaacacttgagcatcagtagtactactgagtggccaggggtcttgtctgtcaaagcaaatgataagttcactcaggccattattgactgctgaactctcttccttcccaactcttccttgaaagagaaaaaaatactttgccttcttgctctccttatcaaatgtttttgtacaaatagtgtaagcctgtttaagcaaaccaattaaaataggcactgattattttgatctgtttgtaacaaatgaatgtaagtactatttacatggtgtgcctaggaggagctgaaatcattggcactttaatccatattgtaaagatcagtatcaaaagcatagtgttcttcacctctcctcctcagcatccatctctatatacttgattaaatggaaaagtctcttttatcacctctatgtaaagttttatgggtagttatcgtcagtgtatttaaatatatcttctagtatgttttaaaggctggtcttcaatactgtggagacaaaaaataaaagagcgtatgaaaagtacgttagacttttgctggcattcaagtcatggctagtctgtgtatttaataaatgtgtgttatttatgtcgtgtttgtcaatggaaaataaagttgaatattctgaaaaaaaaaaaaaaattcttcctgatgtcaactcacgtcaggaatactttacctataactatgttaagtattttgctgaaatcccatttgatgtgctttgtcaaataatagcacaatgtaatgcaacagccccatgctatctggaaaaattagatcattttgttttatattccataatcatgtgcataacaaattattgttgatttaatataaatatgagagttgctcttttccgattttcaacatgatgtttctttgttttattatctcaagattattgttcttaacacagagtgcatttataaattattgaaagctt

SEQ ID NO: 8130 - DNA, 5845 bp, Homo sapiens
  misc_feature (926)..(970): n is a, c, g, or t
  misc_feature (1170)..(1206): n is a, c, g, or t
  misc_feature (1298)..(1327): n is a, c, g, or t
  misc_feature (1540)..(1576): n is a, c, g, or t
  misc_feature (1701)..(1762): n is a, c, g, or t
  misc_feature (5044)..(5086): n is a, c, g, or t
  misc_feature (5311)..(5367): n is a, c, g, or t
gctttgcccagtagttggaaagtgaactcgactcgtgatggttctcctgtcactttggttgatagcagccgctctggtagaggttaggacttcagctgatggacaagctggtaatgaagaaatggtgcaaatagatttaccaataaagagatatagagagtatgagctggtgactccagtcagcacaaatctagaaggacgctatctctcccatactctttctgcgagtcacaaaaagaggtcagcgagggacgtgtcttccaaccctgagcagttgttctttaacatcacggcatttggaaaagattttcatctgcgactaaagcccaacactcaactagtagctcctggggctgttgtggagtggcatgagacatctctggtgcctgggaatataaccgatcccattaacaaccatcaaccaggaagtgctacgtatagaatccggaaaacagagcctttgcagactaactgtgcttatgttggtgacatcgtggacattccaggaacctctgttgccatcagcaactgtgatggtctggctggaatgataaaaagtgataatgaagagtatttcattgaacccttggaaagaggtaaacagatggaggaagaaaaaggaaggattcatgttgtctacaagagatcagctgtagaacaggctcccatagacatgtccaaagacttccactacagagagtcggacctggaaggccttgatgatctaggtactgtttatggcaacatccaccagcagctgaatgaaacaatgagacgccgcagacacgcgggagaaaacgattacaatatcgaggtactgctgggagtggatgactctgtggtccgtttccatggcaaagagcacgtccaaaactacctcctgaccctaatgaacattgtgaatgaaatttaccatgatgagtccnnnnnnnnnnnnnnnnnnnnnnnnnnnnnnnnnnnnnnnnnnnnnggatatgcaaagtccatcagcctcatagaaaggggaaacccatccagaagcttggagaatgtgtgtcgctgggcgtcccaacagcaaagatctgatctcaaccactctgaacaccatgaccatgcaatttttttaaccaggcaagactttggacctgctggaatgcaaggatatgctccagtcaccggcatgtgtcatcnnnnnnnnnnnnnnnnnnnnnnnnnnnnnnnnnnnnnttcatctgcttttgtagtagcccatgaaacgggccatgtgttgggaatggagcatgatggacaaggcaacaggtgtggtgatgagactgctnnnnnnnnnnnnnnnnnnnnnnnnnnnnnngcagcattccatcgttaccactggtcccgatgcagtggtcaagaactgaaaagatatatccattcctatgactgtctccttgatgacccttttgatcatgattggcctaaactcccagaacttcctggaatcaattattctatggatgagcaatgtcgttttgattttggtgttggctataaaatgtgcaccgcgttccgaacctttgacccnnnnnnnnnnnnnnnnnnnnnnnnnnnnnnnnnnnnntacttttgtaagactaaaaagggacctccacttgatgggactgaatgtgctgctggaaaatggtgctataagggtcattgcatgtggaagaatgctaatcagcaaaaacaagatggcaattgggnnnnnnnnnnnnnnnnnnnnnnnnnnnnnnnnnnnnnnnnnnnnnnnnnnnnnnnnnnnnnncgccagtgcaataatcccatgcccatcaatggtggtcaggattgtcctggtgttaattttgagtaccagctttgtaacacagaagaatgccaaaaacactttgaggacttcagagcacagcagtgtcagcagcgaaactcccactttgaataccagaataccaaacaccactggttgccatatgaacatcctgaccccaagaaaagatgccacctttactgtcagtccaaggagactggagatgttgcttacatgaaacaactggtgcatgatggaacgcactgttcttacaaagatccatatagcatatgtgtgcgaggagagtgtgtgaaagtgggctgtgataaagaaattggttctaataaggttgaggataagtgtggtgtctgtggaggagataattcccactgccgaaccgtgaaggggacatttaccagaactcccaggaagcttgggtaccttaagatgtttgatataccccctggggctagacatgtgttaatccaagaagacgaggcttctcctcatattcttgctattaagaaccaggctacaggccattatattttaaatggcaaaggggaggaagccaagtcgcggaccttcatagatcttggtgtggagtgggattataacattgaagatgacattgaaagtcttcacaccgatggacctttacatgatcctgttattgttttgattatacctcaagaaaatgatacccgctctagcctgacatataagtacatcatccatgaagactctgtacctacaatcaacagcaacaatgtcatccaggaagaattagatacttttgagtgggctttgaagagctggtctcaggtttccaaaccctgtggtggaggtttccagtacactaaatatggatgccgtaggaaaagtgataataaaatggtccatcgcagcttctgtgaggccaacaaaaagccgaaacctattagacgaatgtgcaatattcaagagtgtacacatccactctgggtagcagaagaatgggaacactgcaccaaaacctgtggaagttctggctatcagcttcgcactgtacgctgccttcagccactccttgatggcaccaaccgctctgtgcacagcaaatactgcatgggtgaccgtcccgagagccgccggccctgtaacagagtgccctgccctgccagtggaacaacaggaccctggagtgagtgttcagtgacctgcggtgaaggaacggaggtgaggcaggtcctctgcagggctggggaccactgtgatggtgaaaagcctgagtcggtcagagcctgtcaactgcctccttgtaatgatgaaccatgtttgggagacaagtccatattctgtcaaatggaagtgttggcacgatactgctccataccaggttataacaagttatgttgtgagtcctgcagcaagcgcagtagcaccctgccaccaccataccttctagaagctgctgaaactcatgatgatgtcatctctaaccctagtgacctccctagatctctagtgatgcctacatctttggttccttatcattcagagacccctgtgaggagagctcgtctgtgggtgaacacctcctggggaggtccaaatgcatatgctgctttcaggccaaacagtaaacctgatggtgctaatttacgccagaggagtgctcagcaagcaggaagtaagactgtgagactggtcaccgtaccatcctccccacccaccaagagggtccacctcagttcagcttcacaaatggctgctgcttccttctttgcagccagtgattcaataggtgcttcttctcaggcaagaacctcaaagaaagatggaaagatcattgacaacagacgtccgacaagatcatccaccttagaaagatgagaaagtgaaccaaaaaggctagaaaccagaggaaaacctggacaacctctctcttcccatggtgcatatgcttgtttaaagtggaaatctctatagatcgtcagctcattttatctgtaattggaagaacagaaagtgctggctcactttctagttgctttcatcctccttttgttctgcattgactcatttaccagaattcattggaagaaatcaccaaagattattacaaaagaaaaatatgttgctaagattgtgttggtcgctctctgaagcagaaaagggactggaaccaattgtgcatatcagctgactttttgtttgttttagaaaagttacagtaaaaattaaaaagagataccaatggtttacactttaacaagaaattttggatatggaacaaagaattcttagacttgtattcctatttatctatattagaaatattgtatgagcaaatttgcagctgttgtgtaaatactgtatattgcaaaaatcagtattattttaagagatgtgttctcaaatgattgtttactatattacatttctggatgttctaggtgcctgtcgttgagtattgccttgtttgacattctataggttaattttcaaagcagagtattacaaaagagaagttagaattacagctactgacaatataaagggttttgttgaatcaacaatgtgatacgtaaattatagaaaaagaaaagaaacacaaaagctatagatatacagatatcagcttacctattgccttctatacttataatttaaaggattggtgtcttagtacacttgtggtcacagggatcaacgaatagtaaataatgaactcgtgcaagacaaaactgaaaccctctttccaggacctcagtaggcaccgttgaggtgtcctttgtttttgtgtgtgtgtgttcttttttaattttcgcattgttgacagatacaaacagttatactcaatgtactgtaataatcgcaaaggaaaaagttttgggataacttatttgtatgttggtagctgagaaaaatatcatcagtctagaattgatatttgagtatagtagagctttggggctttgaaggcaggttcaagaaagcatatgtcgatggttgagatatttattttccatatggttcatgttcaaatgttcacaaccacaatgcatctgactgcaataatgtgctaataatttatgtcagtagtcaccttgctcacagcaaagccagaaatgctctctccagggagtagatgtaaagtacttgtacatagaattcagaactgaagatatttattaaaagttgatttttttttcttgatagtatttttatgtactaaatatttacactaatatcaattacatattttggtaaactagagannnnnnnnnnnnnnnnnnnnnnnnnnnnnnnnnnnnnnnnnnnttaagcaaactactacagccaactcaaaagctaaaactgaacaaatttgatgttatgcaaacatcttgcatttttagtagttgatattaagttgatgacttgtttcccttcaaggaaacattaaattgtatggactcagctagctgttcaatgaaattgtgaattagaaacatttttaaaagtttttgaaagagataagtgcatcatgaattacatgtacatgannnnnnnnnnnnnnnnnnnnnnnnnnnnnnnnnnnnnnnnnnnnnnnnnnnnnnnnngtctaaaaatatattatacaaactaaaatgtagatgaattaacctctcaaagcacagaatgtgcaagaacttttgcattttaatcgttgtaaactaacagcttaaactattgactctatacctctaaagaattgctgctactttgtgcaagaactttgaaggtcaaattaggcaaattccagatagtaaaacaatccctaagccttaagtcttttttttttcctaaaaattcccatagaataaaattctctctagtttacttgtgtgtgcatacatctcatccacaggggaagataaagatggtcacacaaacagtttccataaagatgtacatattcattatacttctgacctttgggctttcttttctactaagctaaaaattcctttttatcaaagtgtacactactgatgctgtttgttgtactgagagcacgtaccaataaaaatgttaacaaaatataaaaaaaaaaaaaaa

SEQ ID NO: 8131 - DNA, 3242 bp, Homo sapiens
  misc_feature (11)..(11): n is a, c, g, or t
  misc_feature (956)..(1000): n is a, c, g, or t
atttcttatcnggtaaactgtcacttaaatggaggtgtccacatcttaattgtttctccttgacacatttctcaatccacgaagccaggagaggtagagtgaaaatcccagcccatggatgaatgtactaatttgaaagccaagtgttaagtcggatgttttcccgttacactactactcagccctctcctgcggccacatcaacggatgcaagtcacagtcttaacacagcctgtgggagacaagcagtttgtgtgctcacagtatatattatagtaattagggtgacttagagcaaatactcttcagatcctatgtagtcagtgaaacaaaatggagagcgtattctgatagaaggacgtcgacggtgaatgttctggtggttgttgcctgttaagtaaactttagtgtgtaagttgagtttgtcattaaaatcataaaccagctgcggtaacagacaagcctttggctggggagttttaagcctcggtaactgctataaaactagccatccagttaggatagaatgtgtttctttctggttaaaaaaaggaaaaaccatctaagaaaatatatatgtatgtatgtgtgtatacagtggaattcaaaggaccaaagcaaaatttgaacaggaatctattaatttagaattttataagatatttattaataaatgttatttttaaacattccatttgaacagtattctgtaggatctacttgtttttaaagtgttagtccataataaactactatagttatgtgtattttcatttttcagggtttcaaatggctattctccatcatttggtggaaatgtttgcttagatctctgtgcatagacatttcaaggatttttattgctctgtgagttattttttaatcaacattctgaacagttttttttaaacatttatttctgtgtgttcattttttaaagtaagctctttcatttnnnnnnnnnnnnnnnnnnnnnnnnnnnnnnnnnnnnnnnnnnnnncagctttcttgtagaagtgtaaaaacagcttcatctctgcctctctccaccccaccccaatttcctagaaagccttgcactattcagctcccttagtgctttctgtcccttcccgaacaatatgcagtagctttaagccattcaagctccattatgcagtatatctgagaagggaaaggaaacaacccatttaaatttgaataaaaccgtgcctatgcgaacagtagcaatttagaatctcttttctgcttttaaaataatttatatttaaaaattgcactttagctttttgatctctttgtatttctcttattctctttctaacctcttctctgtcctcaaacttgcctttgctctcctttacaataccccccacccctcctccaaggctctgagcggcatcatttaaaatactttactttacagatatttgcaccaggtacatttatgtgcgtccattggtagcacagctgagacctgtgtctcacatcagcctaggtgaagcctactacaagaatgccaaggagaagggccagtacactatatggtttatactctttatccctttattcatagcatgttttttaaaaatgttatattatgcaacagatgtgaggcagcagctaagctatacttaagaattttctctcaccttccaaaccaaagtgtcctgaataagccaggagacttattcttttgtgcaccctggtgcacatctgactgttgtcctagccatagactctctgaggccactgaaagaacagtggccctatcgatttcattcctaggtctcaaaaatacaatgttgccttgtaacataattagggacagcacctctatttcacaattataatctaaggtaggataagacgacacagcagcaataaacttacaagtaaaattcaataccaaaacaaacacaaagaaatttaaaaaacaaaaaacctagctcatcatgttgtgaaaatgaaaaagtgaatgtccattcaaaatattttactatttcttgtggagtttttcagtgatgtaatgcttgtagccaaattgcttaaagagtgtttatatatttttttccttataaattgtctattttttaaaaaagctatttaaccacagctgaagtggggggtaaggccaaattgccaacacttgttaaaagattaatactcttaagtggcactctgatacctttccaacttgtcatcagaaaggaatcaataattaccaactgttgtatttagaccaacttacaatatctagctcattagaagccaggatctagaaagctccttctaagccatttaagatattcttacattgagcttcatattatagaactttataggattggatattttacaatagaataatttagcctcaggactgagaatgtggaagctgaataaattagctttaaatacatcattaaaatcttatgcacaataagctcattagattctagttttctcctttagaataccaatgccacagacactacaggagataatgaaaggtatcagttgtgttgagtggagggagtttaagagaaaggacccttcccaaccagcagccagtagaaaatacaacctactcacctttttcccttctaagttctgctaaatcacatctgcctcatagagaaaggaatgttgcctttgagaactgtcttggagaacagataagcttgaaatgttctctctagagaggacatagggtttgggatcctctgaaaaggcccagaaaaatagctcagttcaaatacaatgttctaggacaattggaatataaatattgtccaaaaatataattaaaagaaaaaagtttagcactgtgtaaagtaagtgttaactgaggaagtcccaaaaaggtgctgtcactttaagttctggacttggggttctttgtatttgtaaacagcaaagcatttgtgtttgtttgtctatttgtaaagcaaccaccttccttattggaaggagaaaaaaaggggtacatacatgtaaatacttgctgcagcatttaatatgtttaattttgtgttaagctttttgttgcatcgtgaacacatttattgttaccaatggacaatgagttcattaagactgttcaactaggtcagatttttacatctctttctagcaagaagagacaagattttgtgcatttgtacaaatgttaatatcactgcaattccaatataataaagcactcaaatgcaaataaaaaaaaaaaaaaaaaaaaaaaa

SEQ ID NO: 8132 - DNA, 1099 bp, Homo sapiens
ggtcaagggggcagagcgttggggtgaatggaacccggccttaaggtgtgactttagccttagatgtgtcgaccgtaacgttcagcgcattacccatctggtggagatgtaacttctaaaaatatggttaataacattcaacctgtttattacaacttaaaaggaacttcagtgaattggtttttattttttaacaagatttgtgaactgaatatcatgaaccatgttttgatacccctttttcacgttgtgccaacggaatagggtgtttgatatttcttcatatgttaaggagatgcttcaaaatgtcaattgctttaaacttaaattacctctcaagagaccaaggtacatttacctcattgtgtatataatgtttaatatttgtcagagcattctccaggtttgcagttttatttctataaagtatgggtattatgttgctcagttactcaaatggtactgtattgtttatatttgtaccccaaataacatcgtctgtactttctgttttctgtattgtatttgtgcaggattctttaggctttatcagtgtaatctctgccttttaagatatgtacagaaaatgtccatataaatttccattgaagtcgaatgatactgagaagcctgtaaagaggagaaaaaaacataagctgtgtttccccataagtttttttaaattgtatattgtatttgtagtaatattccaaaagaatgtaaataggaaatagaagagtgatgcttatgttaagtcctaacactacagtagaagaatggaagcagtgcaaataaattacatttttcccaaaaaaaaaaagcaaaatttaaaataaagtgtatacgttggaactgaaaaggtcttcaaacacccacttcgtgtggggcggggggcccatgggcactcgcgaccgtgcgccacacaggggggcccacagagaaacccgggggcagagacaaagggccgggggattttcccaccaataaaaaaaagcggcgcggggcggaacaccaagggtttcggagcaaacccaaaaggggaggcccgaggcgacaaacggacctcacaacagggagcccaagggaagcccaataaata

SEQ ID NO: 8133 - DNA, 3049 bp, Homo sapiens
  misc_feature (166)..(171): n is a, c, g, or t
tgcttgatctaagtcattaatctactagaagaggggaatgagtatctgtttatagggcagtttttatcctccttggagtatttttcattttctgatccaccccaaagccccagataaattcctttgtacctttatgaactaacttgagtatatattgccttccccnnnnnntttcctgcccatcttccccacccccatccccaggtatgattaacaatgcactaaccatgtactaatgcaatagatcttggctttttattctcttctgtttgtgttgtttggctgtcattttcaatgcagtgctgaagactgtgccctttactgctcgcaccgccaagcgtggctctcggtttttctgcgaacctgttctcactgaggaataccattactaaactattactctttctcacctgatgctcttaaaaggttgctacaggttttttgatgtcttatgtccccctctgtgtgtctgtcagggcccaccaacatgctagcatggaattgccatctccatcatgttatattttgtgttgttctcatgctgcatggttttgcatttcaattattattgctcactcactggccactttcaatacatgtatgtattcacattgctgtaacagtctgggtgtgtttgacagctgaattcatagaattgttcacagaaattttcagaaaaatagagcaaaaatattaagagcacttctttgagaatcagtattggtaccaagtagattgcttataagatttttgagctaatgtccttcaacatatccattaataacaataactgctatacctaacatgtattaagaacttactgtgttcaggttggatgcagtggcacacgcctgtaattccagtactttgagaggctgaggcaaaaggatcacttgagcccaggagtttgagaccagcctgggtaacatagggaagccccatctttacaaaaatcagctgggcatggtggtgcacacttgtagtcccagctacccgggaggctgaggtgggagcattgcttgagcccaggaggtggaggttgcagtgagtggagatcccaccaatgcactccagcctcggcaacagagtgagaccctgtctcaaaaaaacaaaaacaaaaaaacaaaacatactgttctaagtaggtttacagatattaacctagcccttttatcctatacccagttaatatgctttgatagcataatcacctgccatatgaaagtgctcaggaatgcgaagtgctctaaagtgcaaaatgacttgcagaaggaactgtgaactatgcacagctgcaaatcaggcctttcttaactctcttatacgtccatagcatgatggaactcgtaatatgagcttaacacagggagcccttttaacctagcttgtatatgtagatataggcaatccatagctttatgtcaccctactttagtaggccacctctattccttctgaatgtcatgcccatgttcaactatcagtaattccatgttggagcaaagctgtgaggcaggacatgaatacaaaggcttaggtcctcccactgtcttatctcattcacgcatcttcaccggtagctctgttccatgtcaaacccaggctatttcttctgtgatcagatcatatcttgacctgcttctttggtcaggatgatggcaccagaaatactaacagcaaatatcattggaaaatgccactgtttttaaattgggggggaaaaaaggatcaaacttttcaaagtaacctcctgggcacagtttttgatgccaaataagaaacgaacttctctccagtgtctagttgattagaaaagagacaagggaaacacatactctaattggacgtagccattgactcctgtgctgagattgacatggaattgggtatgtgtttattttgtggcataactattctatgaattgcacttatgtatgttcttctatctctgatatcaaaggacatagagtgtcattgcctgctctgcagtgtacttacccaccagtgcttattaacaggctagaaaactgtcatctgcttggctgatgtttgctgtcagttttgctgttggactatatctatctttctggagccaatcttcgcagcttggaactgggtggtcagagagctgggtgggaagatgcactcatccttcccttatttgatctaacatttcttgtagtaatggcttctcattctcttcctctgttggctaacatgcctgggaatgttgagcactaagttgagttgctttccattttcatcccattttttcttaaccatcattttgtgtttttgtttttttctgtttagccttaaagaagaataatatcactaaatttccaaatgttcactcgagagtaaggatttcttctagcacaccggtggtggaggatacacagagctggcaagcatcactttttacttagcttcctcctctctctgtatgcagatcaatggttttcaatctatggctgagggtaatactggtgagaatctgaccagggagtttttgtacctcacattccaatgatgcagggattgagcctctctgttggactctttctcggcctgcttttaagttctaagtgtgatggcttgggcaagggtatttgctgatgattgtatttgctttgagtgttgggctgtccttcccttacccctgtcttggcctttgagttactcagttaaacccattttgatctgaagcgactgaaagcaggtcctggccaggtaacattacagcctttgaaggattaagatctttagaactaattgctcagaggatgaagaaccacaaagctgcatatgaggcaaaagtgtaattctggcctttcattaccagtgtgggctaggaagcagaggcttgagaggattggggtatgcaaaactattttttccttaaatttaagagtagaggctgggcatagtggctcacacctgtaatctgtaatcccagcactctgggaggccgaggtgggcaaatctgttgagttcaagatcaccctgggcaatgaagcaaaatccccatctctacaaaaaaaaaaaa

SEQ ID NO: 8134 - DNA, 3563 bp, Homo sapiens
tgagcacagtggttatcggcacgaggcacacatgcctttctaatttccacagccacatggatgctcacacactcacacctttgcacacacacacaagctggctcacagacacactgggggcccagatcctggtcattccccacaggtcttaataaaggttcatggaaggaaacctgtttcctaaggtagggtgggagtgtgtgtgagtgtgtgggggggagagggtgagagtgtgtgcgtgtgttagtgtgagtgtgtgtgtatgtaaggagcaggagtgactgggtcctgagtttagggagttgggaagaggaaggagagatggagacaagcctggaccaagagccactcagagctgcctggaagggaagccaggctgagaaaaaggcaaggcaaagaaataagacactgacaaggatcaagccagggttgagtagggactgggaacagagtctgcctccatgagaagctgtcacattgctgctctggtgccctgtgacagcggcaccatctccagctggagactcccctctctggatcttgtcattgtgactttgctttgttggacaaccaggagtggtgataggcagggaatatggtgcccagggcagctagccatgccacgccagtccagctgccaacccacccgtcactggccatctcatcacctgctggagggagtggggtggtgcagatgaaaccagcgatcagcttggctgcccttgcttcctagtgccacagtagaggctaggggagcaactggctttcctccccaaaaggcgggcagggttatccacactttgcccaggtccctgaagcctgcggctgagctcggggataacaggggccaagtcaccggtcccagacacctaggaactattagagacaggaaccagcatatgagacaggggcttttaagtaggaggttggagaacacacgtttttggtctaaaccgggggcccctctctttgcccactgaacccgcggcctgcgtggtgctgagactgcctctggccgcgtccgcttgggacagggcctgagcggtggctgatcccacctggatgtcctgggccggctcccacccgacgcccgccatcccgggacgtggtggggagaggctggcgctgctccttgccatgcttggccgctgctgcccggctgggggtcccgagtcgcacacgccccgcaagccctggccaccgacccggagggaacgccctgggctacggtccccgaagccaagagaagaagcaggtcccagggccgactccaaagccgcatctccagctttgttcatgggtccgggaagcagaggccgccgccggccaccgtcgtgggcgagaagaagggcacgaggcggccggggctcctgcccggaaccacatgtgcgcgccgggcccgcttcttcatcgcacttgcggccccggctgcccggggcctgcgagtttccagccagggcccgggactctggcgcggtccggccgcgaggaaggaaggcgcggcccgggtgggggtagcggcaggcctgcggctccggccacggggcgggggcagaaaaacgaccccggcgctgtccgggcatccagctcggttcccgctgcagccaggagactcccgggagcgctctaggaaccacagagccctggaactcacctggcagcctcgcggcgctaaagccggcggagcctgagacagcgcgcggcgaggcggtcacgctccacccccgcgtggcagcaggactcggatttcgcccctggttttaaaattgtgccggtggagcccgggacgctgggaagagcgttctgcgcccctccagtcgcggtctccgccctaaaccgacttccagagccgcctctgctccctggaggggcgcagtggcggacaccggcgtcccacgaagtcgcaggtcctcagtctgagggctgccccacacgctcggaatgcaggagggtctccgcctcgctgcgctgcccctgggggcggaggcgtgcgctgcaggcgagagaggcggcccggtatcgatggagaggcacagagggctttgaggtcgcagcgtcccggttgctgagcggagtcgggagtcaggttccaaagggacagcgctcagggttgtaatcaccacccggcccaccgcttccgcagctgcgagtctagggcggagctgttgggtggaccgagcaggcgaggcgcaggcaggcagcggctccgcctcggaatccgcctcgaccggggcacaggtgcccgccccacctgtccctcggtcaccccaaccctgtttcctcgacccccagcactcctccaggcctagttcgcttcagaagcgcaagacccggaaaacaaggaagaagcgagctcagcctcaatccccgtccccaccccactttcgggaccgctacgctggagaattgaagggggcggaccccggattaaagccgctcccttcccagcctcgccccgctttcctaatgtccgtgatgatttcgttattggcagggaagagccaggctccctgcgctcccaagacggggcgattgggagggggttctggagctcacgcctggggtcggcccggcgggggtgaccccgcgccctcgccggtgcaaggagaacagctggttcccgccggggcagggaagcgtggacggtgtgggctcaggcgcctggcaggcacgcggggcctctaaagcttggtcactgtcacagatcatgtggttgtttcttccgtccccgccacgccttcctcccgggatggggattcattccctagcaggtgtcggagaactggcgcccttgcagggtaggcgccctggagcctgaggcgggaactttaaaatcagacgcttgggggccgggctgggaaaaactggcggaaaatattataactgaactctcaatgccagctgttgtagaagctcctgggacaagcggtggaagtcccctcaggaggcttccgcgatgtcctaggtggctgctccgcccgccacggtcatttccattgactcacacgcgcgcctggaggacggaaggctgcgctggacacgccggtggcgcctttgcctgggggagcgcagcctggagctctggcggcagcgctgggagcggggcctcggaggctgggcctggggacccaaggttgggcgaggcgcaggaggtgggctcagggttctccagagaatccccatgagctgacccgcagggcggccgggccagtaggcaccgggcccccgcggtgacctgcggacccgaagctggagcagcctgaatatgtggtgtgaccccaaatgctgtgtcctttaaatgttttaattaagaataattaataggtccgggtgtggaggctcaagccttaatccccagcacctggcgaggccgaggagggaggatcccttgagcccagaggttcgagactagcctgggcaacacagtcagactccatccttccaaaacaaacaaacgaaaataaaacaaacagaaaacgttatatcttttgagctccctcccttttattatgtaatgaatatgtgttgcttttgtaataggaaaatataaagttaaaatttca

SEQ ID NO: 8135 - DNA, 2988 bp, Homo sapiens
agaactattttacgtgtttctaagttgttggctacatcaaagagatcatctgtattctgcatatgggctggctttggtgaagctgatgactggacttctaagaaccgttttcccaaatgggttcccatattcatgcacccaaagcaatggtccccaagcactgatgaaaactaatatgcatttcccaaagacccacactatgtatcaggagcctgcaccatgccatttgaatgaccctcagcaatgtgcctccctgccctcaaattcccagttgataacagtgtttgattaaatttccactcaagccaaacatggttactaagaagagaaaaacctgatgtttgcataatattttttttcccctcgagatggagtcttgctctgttgcccaggctggagtgcagtggcatgatctcagccactgcaacctctgcctcccgggttcaagcgattcttctgcctcagcctcccaagtagttgggattgcagacatgtgccaccacgcctggctaatttttgtatttttagtagagacagggtttcaccatgttgaccacactggtcttgaacttctaaccatgtgatctgcctgcctcggcctcccaaagtgctgggattacaggcttgagccaccacgcccagcctaagattttatgattaaaaaaaattcaagctcaatacccacataaattataacgtttctcaggaagtagtcccttaaccaaaacgtctctgagaagtgatgcttaggcaatctctgggatccgattttcccacatgtctcactccacagtatgctaaagaagaaaaagtgagtgggcacaacactttgaccctctggctaagccctgggagtccctgacaggtccagaaacttctctgacacccattcaccagggtgctgagataggagaaagtgctcatttataatgtgtattctgtgcagctgttctcagacaagaccggatcttgtcatcttaccttttgctttacaaaaaaggcctgttgaagtcaatgctgtcttgccccttgctgtttcagcaggttagactttggtcttcactgcttatagctgcattggaggccaatgtagctgatgctcagggtcaggcctcgccccttcgccgcaggtctcaggatcggggataacatcgctcccaccctgctcatttagagatgggaaacaagcaagagcttgacttgcctcccatccctcagcctgtctgtggcagagcctgcaccaaaacccagagcttcttccctccgtgagggccacgctgtcaccacagtcctcccagatgggttttggattagcatcagtcctgtgtcaccaagtgccaaacagctgaggggtagaagtgggactcctttcccgagccccagcatgaggctgtggtgtcaggtttaggcctctctcaagtcagaaaaccccgggctgagacctccacagacaagggctccccatgctggccattggcaggggcccaagaagttcagtgaccaactggtccttccacaccacaccagctggtgctgcccatgtctgtcgaatcataacggaaaattccccagatcacgtttggatttaaaaactcatcccttgtcgtgcttcaatgcatgccatttgtcacttaccatacttcaccatggccgagcttcatgtcacatggcctggcgattgtgcttgttcacactggggccaggattttcatactaaaacgtcactgacaatggggctacttttctcctgaatagctcctctgggcttgttgcagttctagttttcccagtagttccatggcaggttcaacctctcagtgtcctgaaaaatggaaccacccactaaccatatgcactggctgcccaggtggctgcactccggggatcacctttcagtactgagttccttcacgcacttggttcaccaccatcactcttgagttttggacaaaagaggtgggtatgccaggcacagtggctcacgcctgtgatcccagcactttgggaggctgaggcgggcggatcacctgaggtcgggagttcgaaaccagcctgaccaacatggagaaaccctgtctctactaaaaatataaaattagccgggtgtggtggcgcatgcctgtaatcccagctactcgggaggctgaggcaggagaatctcttgaacccaggaggcaaaagttgcaatgagctgagatcgtgccattgcactccagcctgggcaacaagagcgaaattccatctcaaaaaaaaaaggtgggtaaagggccatgagcccaaaccactaggttgttcaccttttcatctgaaaatgctttactctgactatgtgctattgggttttatttccagaaaatatagttctccttttttctgcatgaaggatacatcgtggtgccacatgctttaagcaatttaaacaagagagataagaggaaaatgcaaccaccacatctgacttgcccaatgtagactttcctctattagattgaagtacacaacctaatatgatatattattttgtagtatctcagactttgtaaataaataccattatttttatatggaaattttatagaagagctatttctgttaccgtaattactcctgattttcctgaaattgccttctggtaataacagacaagtcctaagcagtgttccactaagggtggttccaggcctgcctgccgtggagttgactgggggaattttacagttttgcgatcctaggatgcgtcccagacgctcagtcagaagtgctggaggtggggcctgggaagctgtatttgtaatgaactctggtgttttttgtccattaaagtgtatctttgtccatcctataagattaaaggaaagaaaaagcatctcaaatgagtgtaagttgttcttgagaaaaaaatgtatcagacttttatgatttgaatgaaatgtattatagaaaaaaataaacactttaaaataaaaaaaaaaaaaaaaaaaaaaaaaa

SEQ ID NO: 8136 - DNA, 902 bp, Homo sapiens
tttttttttttttttttaaagaaaaagatatttgcatttctttacttagacttattttttcattgatacttcatcctccctccatcaaatcctgctcctttactggtttggtgtctatctttggacaagtaatttggccttccagatttgccttcctcatctgaaaagtgatggtaaatttatgggttgtcacctggtttcttggggttccaagaatatagtactgcagttccaggagtcatttttattagagtaaaagccctagaatatattttgcaataatgttagttagtttaacgcaattggctccagccctctaccaagcctcagctttcaagtaactcatagtcctgtgttctggaagtagggggatgagaggattcagaagttactgcacatggtatctggcatgcagtagaacgtctgcgggagatggagaaaggttggcaacccacaggactgagtgagtttccctagggatctgcctgccatcctccaaaaattatgtaaattgtttatgtttccatagtccttactgacaattgtacatgcaaatttcatttaaattataactaaaattttcatcattagctttttttaaaaaaattagagctttaatgagaaaagataatgtttaatgccaagaacaaactggttgatgattctaaaagaaagctccaccacatagactttagggggaaagaaattttgataaaaatctaagtcttttagtggatactgcagaactgactatggcaagattttgagtaaccactgctaaagtttgtttttttttttaatgaatactcaaagatatatttaaccaatgaaattctaaatctgtactcattttatgttggaggggaggcaaaatagggagatgggagcttttcacatatttc

SEQ ID NO: 8137 - DNA, 3469 bp, Homo sapiens
  misc_feature (219)..(245): n is a, c, g, or t
  misc_feature (3421)..(3421): n is a, c, g, or t
ccctggtctcccaccctgctcgcatgtctctgactgtgtctctccgttctctctgtctctcctacatcgctagattcgtacactccgatgctgtgcttctccgatagctcggtcttgttctttccgtttctgtctagctggttctcagcgcttcagttctcagttagcctctttcctagcctgttgtctgatatatctttattctgcttctgcttggtnnnnnnnnnnnnnnnnnnnnnnnnnnnctctgtgtccgattttccggtgtctttggatgttggttgctctggtgtggtgttgctttgctgcctctgtggctgtgtttcgtgctgctcctgtcttggctgcacgcgctgtgctgacctcctgctctgctgtacaccgtcttatcctagcgacccctgtcgcccctttgtttgcctgctttgcccgcttttcctttccttgtcctctctccctccccatgcggttgtttgttgttgtttctcgtctgattgttttcggttctggtggttggttcagcgggtttcgttcttctcgctctgtgctcgatggctggtcccgcttggttgtgtgctctcgcgtgttcagttgtgtcaccttgcctcccggctggtgtctgcgattgctctggtcgactctcgctccggtactttggtgttgcggcttcgggtcatgtcgagtgcggcgctccgttctcgttgctgtccgtgcgttcttgctctttttctttccttgtctgtctctccctcgcgttgtgtcagtgttcgtctgttctgctttcgtgcttgtgcgttctttcttgtcgctcccgtctgtctccctgtttcgtctgtgtccgtcccgtatgttgcccgcctgtgtgtccttttcgttccgcttccgattcctcccgtcgtctttttccggttgtgtggtttcctcgttcgctggtctgtcgtctgtcgtcgtttcttgtttgttggtgcttatgttcgtccgtcgtgatggttcgcccctcgctcacggtcggttgttcgtcggtttcgtggctgtcagtgcgatgcgtgtcgttctcttctcgtgtgctcggtcctgtctcgtcttcgacgtctcggtcgattgttcttttgatcccgcgtccctctcgtgtcgacgcgtcgtttgatggctggtgcgtccgttgtcgatgcggcacgtcggtctgttggtatcgcacgcgtgcggtgtccgagtcgtgtggtgccgctctcgttggtgatggatgatttttggtgctgtgccgcgccgctccccgttttgtttttgtttttttttttttttttttttttttttttttttttttttttttttttttttttttttttttttttttttttttttttttttacgaatgaggcaatttattaacccagcatggtttgttctaatgcttcttgttggcagctgccacctgtccggcgattctgtccagatctctttgtcccttctgtcgtcttctcgcagccgtatagtagtagtaggcggccgctttttttaaatatttaagagtttatttgagcagtgatccatgaattgggcagctccaagccagaagtggctagggagctccccagagagaacatgaggaggaggctttttaggacaaatagataaaagcaaagataatatttcattggttacagttatacagttacacagttatacagttgccttatttggtctatcccatgaggaagtcctagttactaattacgtttttgttggctgcttctgattggttgagcttaagttctgtgtttctttaacataggcatttacaagaaataccacaaataaagtttcagacatgcttgcaaatcaagcaaggttaaggtcacttaggaggcccaactggctctgtctgctcaaggattcttctggcctcgtctccattttacatgtactggttgcataaattaacactagagctacctgaaacaacggaggtgatcattctgcctaccgagtgttggccaggccaagcttggagtgttgctcttattcttagggagtttatttttaagtaatctcatctgtaaatgggattacaatccacaaactgaccttgtatatgattccattccttctcccagcccagccccacactccaaggttttccctttgcttataaggggtagtcacccttttttatttcgaccttccaaacattctgggagttttcctcctttaggccaactacagcgcagaggagcgctttctcctgctgggtttctccgactggccttccctgcagccggtcctcttcgcccttgtcctcctgtgctacctcctgaccttgacgggcaactcggcgctggtgctgctggcggtgcgcgacccgcgcctgcacacgcccatgtactacttcctctgccacctggccttggtagacgcgggcttcactactagcgtggtgccgccgctgctggccaacctgcgcggaccagcgctctggctgccgcgcagccactgcacggcccagctgtgcgcatcgctggctctgggttcggccgaatgcgtcctcctggcggtgatggctctggaccgcgcggccgcagtgtgccgcccgctgcgctatgcggggctcgtctccccgcgcctatgtcgcacgctggccagcgcctcctggctaagcggcctcaccaactcggttgcgcaaaccgcgctcctggctgagcggccgctgtgcgcgccccgcctgctggaccacttcatctgtgagctgccggcgttgctcaagctggcctgcggaggcgacggagacactaccgagaaccagatgttcgccgcccgcgtggtcatcctgctgctgccgtttgccgtcatcctggcctcctacggtgccgtggcccgagctgtctgttgcatgcggttcagcggaggccggaggagggcggtgggcacgtgtgggtcccacctgacagccgtctgcctgttctacggctcggccatctacacctacctgcagcccgcgcagcgctacaaccaggcacggggcaagttcgtatcgctcttctacaccgtggtcacacctgctctcaacccgctcatctacaccctcaggaataagaaagtgaagggggcagcgaggaggctgctgcggagtctggggagaggccaggctgggcagtgagtagttggggaggggagaaagtattaagccagaacccaaggatggaaataccccttagtgagtcagtttagacttcaggctgttcatttttgtatgataatctgcaagatttgtcctaaggagtccaatgggggatatgttttcctcccgtgaggaaatgtttagttcttgagggaaaatccctaaatcctctatatactcaggtttagggaaggaaaacctacccctcacaactccacgcgcagggaaaatgatggaagtgatgcntcgcctttagcttcctccctatctgatggaagaccatggaagacctct

SEQ ID NO: 8138 - DNA, 680 bp, Homo sapiens
ccattctgatgttggagcggcagcgtcctttttttttttttttgtattaattggtaagtgaaaactctgttaaagatcacaccacaatgttttcaagaaacatctgaaaagataaaacaaagaacaaataacttataatacttacttaaattgacactttttgaaatgccagtctgaaaataattaagatatctctgctttgtatgagtttcttttatgaaacttgataccacgggagtccagtaatattggccacaaaagccagagaaagtaccaagcccagctttgttatcatagccacttcctgccctgcttctgttatttttagtgttttttcagatataaatcggggtccaggaaatcctcaccagaatctggcactgcagccaaaggcgatacttccagagttctagtaggctgctatggaatttctggcatgaaaattcttgacccctcacactttaccccctgtacagcacaggcataccatggagatattacaggatcagttccagaccaccataataaagtggatatcgcaataaagtgagtcacacaaaatttttggtttctcagtgcatataaaagttatgtttacactctttagtagtctattaagtgtataatagctttatgtccaaaaaatgtacatgttttattttaaaaatactttattacta

SEQ ID NO: 8139 - DNA, 1006 bp, Homo sapiens
cccacgcgtccgttatggcgcgggcctggagcttccgcgcggtggcttcactctcctgtaaaacgctagagcggcgagttgttacctgcgtcctctgacctgagagcgaaggggaaagcggcgagatgactgaccgctacaccatccatagccagctggagcacctgcagtccaagtacatcggcacgggccacgccgacaccaccaagtgggagtggctggtgaaccaacaccgcgactcgtactgctcctacatgggccacttcgaccttctcaactacttcgccattgcggagaatgagagcaaagcgcgagtccgcttcaacttgatggaaaagatgcttcagccttgtggaccgccagccgacaagcccgaggagaactgagactctgccttaccaccgcagtgcggggcacctctcccagcgtttctccggtttgccaatcctcttaagtattcctgtctccaaaggaccggctctccatggctcctgcgcctcgtgctttccgcgtacagaagtgcttgcccggggagtcccgcctgacctgccttcatgtggacccttagaacagcactgggagaccagcaggactcctgagaactgtgctggtggagaggtcctagagccggcgagcgtttgagaagagggcatggcgctggagtgagatgggatttggcgtctcgtttttggctaattgattgtcattggctttttccataaagtttagaaatcgttcaaaaaaaaaaaaaaaaaaacctccaaggccctccaactgtccgagttgcgcgcaaaaacacagcgctattccaacactgcggcccccatgtcacccatcaacagtgcataccccttgaccccacagcacatcctccttgatccaccgcagcgcggctaacatacgcatgccgcgtaacacccctaattattcacggcacctccaatttaaaccttccccaaataacgcacgggtaaacccctggccattaattgaagctgtcgcgcaa

SEQ ID NO: 8140 - DNA, 3142 bp, Homo sapiens
ggcacgagggtgtgcgtgatggagaaaattgggcaccagggctgctcccgagattctcagatctgatttccacgcttgctaccaaaatagtctgggcaggccacttttggaagtaggcgttatctagtgagcaggcggccgctttcgatttcgctttcccctaaatggctgagcttctcgccagcgcaggatcagcctgttcctgggactttccgagagccccgccctcgttccctcccccagccgccagtaggggaggactcggcggtacccggagcttcaggccccaccggggcgcggagagtcccaggcccggccgggaccgggacggcgtccgagtgccaatggctagctctaggtgtcccgctccccgcgggtgccgctgcctccccggagcttctctcgcatggctggggacagtactgctacttctcgccgactgggtgctgctccggaccgcgctgccccgcatattctccctgctggtgcccaccgcgctgccactgctccgggtctgggcggtgggcctgagccgctgggccgtgctctggctgggggcctgcggggtcctcagggcaacggttggctccaagagcgaaaacgcaggtgcccagggctggctggctgctttgaagccattagctgcggcactgggcttggccctgccgggacttgccttgttccgagagctgatctcatggggagcccccgggtccgcggatagcaccaggctactgcactggggaagtcaccctaccgccttcgttgtcagttatgcagcggcactgcccgcagcagccctgtggcacaaactcgggagcctctgggtgcccggcggtcagggcggctctggaaaccctgtgcgtcggcttctaggctgcctgggctcggagacgcgccgcctctcgctgttcctggtcctggtggtcctctcctctcttggggagatggccattccattctttacgggccgcctcactgactggattctacaagatggctcagccgataccttcactcgaaacttaactctcatgtccattctcaccatagccagtgcagtgctggagttcgtgggtgacgggatctataacaacaccatgggccacgtgcacagccacttgcagggagaggtgtttggggctgtcctgcgccaggagacggagtttttccaacagaaccagacaggtaacatcatgtctcgggtaacagaggacacgtccaccctgagtgattctctgagtgagaatctgagcttatttctgtggtacctggtgcgaggcctatgtctcttggggatcatgctctggggatcagtgtccctcaccatggtcaccctgatcaccctgcctctgcttttccttctgcccaagaaggtgggaaaatggtaccagttgctggaagtgcaggtgcgggaatctctggcaaagtccagccaggtggccattgaggctctgtcggccatgcctacagttcgaagctttgccaacgaggagggcgaagcccagaagtttagggaaaagctgcaagaaataaagacactcaaccagaaggaggctgtggcctatgcagtcaactcctggaccactagtatttcaggtatgctgctgaaagtgggaatcctctacattggtgggcagctggtgaccagtggggctgtaagcagtgggaaccttgtcacatttgttctctaccagatgcagttcacccaggctttggaggtactgctctccatctaccccagagtacagaaggctgtgggctcctcagagaaaatatttgagtacctggaccgcacccctcgctgcccacccagtggtctgttgactcccttacacttggagggccttgtccagttccaagatgtctcctttgcctacccaaaccgcccagatgtcttagtgctacaggggctgacattcaccctacgccctggcgaggtgacggcgctggtgggacccaatgggtctgggaagagcacagtggctgccctgctgcagaatctgtaccagcccaccgggggacagctgctgttggatgggaagccccttccccaatatgagcaccgctacctgcacaggcaggtggctgcagtgggacaagagccacaggtatttggaagaagtcttcaagaaaatattgcctatggcctgacccagaagccaactatggaggaaatcacagctgctgcagtaaagtctggggcccatagtttcatctctggactccctcagggctatgacacagaggtagacgaggctgggagccagctgtcagggggtcagcgacaggcagtggcgttggcccgagcattgatccggaaaccgtgtgtacttatcctggatgatgccaccagtgccctggatgcaaacagccagttacaggtggagcagctcctgtacgaaagccctgagcggtactcccgctcagtgcttctcatcacccagcacctcagcctggtggagcaggctgaccacatcctctttctggaaggaggcgctatccgggaggggggaacccaccagcagctcatggagaaaaaggggtgctactgggccatggtgcaggctcctgcagatgctccagaatgaaagccttctcagacctgcgcactccatctccctcccttttcttctctctgtggtggagaaccacagctgcagagtaggcagctgcctccaggatgagttacttgaaatttgccttgagtgtgttacctcctttccaagctcctcgtgataatgcagacttcctggagtacaaacacaggatttgtaattccttactgtaacggagtttagagccagggctgatgctttggtgtggccagcactctgaaactgagaaatgttcagaatgtacggaaagatgatcagctattttcaacataactgaaggcatatgctggcccataaacaccctgtaggttcttgatatttataataaaattggtgttttgtaaaaaaaaaaaaaaaaaaaaaaacgagggctctatgtccgggtgcggaaaaaaaagtaatggaaaggggccctggggcctagctggtttccggaccccgcttccttggaacaaagggggaaatttgcccgggccccccataaggggaggcggaattattttcaaaaaccccgggtttacctg

SEQ ID NO: 8141 - DNA, 1191 bp, Homo sapiens
ctgggtggcgaatttccgacgaggcattcattcaataagcttttactgcataaactttacatccagcactgtagttaagtacccaaaattgaatagaaataatggcttttgaaaattgcacaaagcaggccaggcacggtggctcacgcctgtaatcccagcactttgggaggccgaggcaggcggatcacgaggtcaagagatccagaccatcctggctaacacggtgaaaccccgtctctaataaaaatacaaaaattagctggacatggtggcacgtgcctgtaatcccagctactcaggaggctgaggcaggagaatcgcgtgaacccggggcccggtggaggctgcagtgagacgagatcgcgccactgcactccagcctggcgacagagcgagacaccgtctcaaaaaaaaaaaaaaagaaaattgtgcaaagcataggtaaatatttttctttattaagcttctcactgagaagccctctttattttggtaaatgtcactctgtttgttaggagatgtctgcttttccatgaaatgaaatagtggctaaagccctgaaagaggcaagactacaatgggctgaaacagttggtatagcaaccccagagaagtgcttcattttctttttatagtagaagcaggtccatgtcttttgtggtttcctgcacatctttggagtagttatgacttctcagtttttccccccttaaactgcattgcctattcttttttcctgacatgctatcaggtatcagtgtgttgaatacataatgcttgtgtatcagacttacgttactgtcatcaccattaaaagaattgcagccttgtgccccatgaccttcaaaaaaaaaaaaaaaaaaaaaaaaaaaaaaaaacggtggtggggcggccgtgggccccggaaaagctttttaagaacaaatctgggtgggggcacgggggccccaagattgggataggcgtgaaacggtggctcaatagcgtgtttcccatgaggagaaacacggggcgccacagagcacaagagaggcgcagaggagatcctccacccccatataaagagacaggcccgccggggagaaaaccgcgagagggttagcggacaacacaatatctccgaagagggagagtcctgcgaggagcacaaatacaagggggagactcctaaacacacgaggaagcccc

SEQ ID NO: 8142 - DNA, 2035 bp, Homo sapiens
aggcacgaggggagcctgagccctgcggaacctcggcgctcggccccaccccgcccgtacctgcacttatttattgttgttatttcttaccgcggagccccgcagtcgggtcctcccgcccgctcccgcgcagcgctagcattctccagtccctcagtcccttcccgcgcggtgcgccgcagccgaggcgatgcgcctcattcagaacatgtgcaccatcgccgagtaccccgcgccgggcaacgccgcggcctccgactgctgtgtgggcgccgccggccgccgcctggtcaagatcgccgtggtgggcgccagcggcgtgggcaagaccgcactggtggtccggttcctcaccaaacgattcatcggtgactatgaaagaaatgcaggtaatctctatactagacaagttcagatagaaggtgaaaccctggctcttcaggttcaagacactccaggtattcaggtccatgagaacagcctgagctgcagtgaacagctgaataggtgcattcgctgggcagatgctgtggtgatcgttttctccatcactgactacaagagctatgaactcatcagccagctccaccagcacgtgcagcagctacacctgggcacccggctgcctgtggtggtcgtggccaacaaagctgacctgttgcacatcaaacaggttgaccctcagcttggactgcagctagccagcatgctaggctgctcattctatgaagtgtctgtcagtgaaaattataatgatgtctacagcgccttccacgtcctctgtaaagaggtcagtcacaaacagcagcctagcagtacacccgagaagcgaagaacctccctcattcccaggcccaagtcacccaacatgcaggacctgaagaggaggtttaagcaagccctctctgccaaagtgaggactgtcacctccgtctgaagcaggaggagcactcaagggggtttggtcttcccaggaagagggcctgaggttctcctagtgcaggaacgttgaatattggcaatgattcctggttccagaaagggctggagcagaagggccaagagggcctgtggaactgctacagaaaaggaagtgttgttctgagcagggggacaggattgatgaggcttgaaagagcccactgagccactctctgaatatgtgaaatgtactctgtgtcttttcctttagagtggggagggggcataatcgtttcggtttctgcattcaactaccttgtaaatggtggtccgttgcagtttcaccaaatgtattgatgtgatttacagtgggaatgaaagaacagattaagcattgataggctttcttttttcccccttttttcttttttctcttttcttctttcttttcctctttttccccaagaggaagaattgcttttctcttaccagtatgatttgtaactctggaacactattcttacagaatgcctttctaacctgaaggatacccagatttctttctttatgtacaagatggaaaatcccctacccctcaaaaacaggttgagtttatgggccagaatattttgtataccagacattggtaagctctcatggtttacaggaaggctctggttccccctcacaggatgagcatgctcagttgggcgtgtgtggaggagctgtgaacttcacgctcttcaaccccagactttgactgtatagttttttgtttttttaactgttccatcaggaaaaaaatgtgtcagttgattttggtgtgacttgtgtaaatggttcatggcaatgacgttgggttgcttcctaggcctggctgagttgtgcctaagggtggctgaaatactaaaacacttatcttacagcaagtgaacaggggctacctgccacatcccctccacagatgcactttaaaaagccactcatgctttggcttaaactgtaattaatttattttatgtacaataaatcgcatttgaaaaagaaaaaaaaaaaaaaaaaaaaaaaaaaaaaaaaaaaaaaaaaaaaaaaaaaaaaaaaaaaaaaaaaaaaa

SEQ ID NO: 8143 - DNA, 2462 bp, Homo sapiens
gcttcccggggatagcgcggagcacgcagcagcgagcggagcgcgggcggcggcgccgtacctcgggctgcgggagcgcgggcgccctggggtcctcggaatcacaatgaggacctagggcatctgtctgctgacgccccctggcctgcagtgaccatggccccccgcaagaggagccaccatggcctgggcttcctgtgctgcttcgggggcagtgacatccccgaaatcaacctccgggacaaccaccctctgcagttcatggagttctccagccccatcccgaacgcagaggagctcaacatccgctttgcagagctggtggatgaattggatctcactgacaaaaaccgagaggctatgtttgcactgccccctgagaagaaatggcagatctactgcagcaagaagaaggagcaggaggaccccaacaagctggcaaccagctggcctgactattacatcgaccgcatcaattccatggctgcgatgcagagtctgtacgcgtttgatgaggaggagacggagatgaggaaccaagtcgtggaagacctgaagacagccctccggacacagcctatgaggtttgtgacccgcttcattgagctggagggcttgacctgtctgctaaatttcctccggagcatggaccacgccacctgtgagagccgcatccacacctcactcattggctgcatcaaagcattgatgaacaactcccaggggcgggcacatgtgctggcacagcctgaggccattagtaccatagcccagagcctacgcacagagaacagcaagaccaaggtggctgtgctggagatcctgggtgctgtgtgcctcgtgcctggtggccacaagaaggtgctgcaggccatgctgcactaccaggtgtatgcagcagagcgaacccgcttccagaccctgctgaacgagctagaccgaagtctgggccggtaccgggatgaagtgaatctgaaaacagccatcatgtccttcatcaatgctgtcctcaatgctggagctggagaggataatctggagttccgcctacatctacggtatgaattcctgatgctgggtatacagcctgtgattgacaagctccggcaacatgaaaatgccatcctggacaaacatttagacttcttcgagatggtgcggaatgaggatgacctggagctagccaggaggtttgacatggtccacatcgacaccaagagtgcttcccagatgtttgagttgatccacaagaagctgaagtacacggaggcctacccctgcctgctctctgtgctgcaccactgcctgcagatgccctacaaacggaacggtggctacttccagcagtggcagctcctggaccgcatcctccagcagattgtcctccaggatgagcggggtgtggaccctgacctggctcccttggagaacttcaatgtcaagaacatcgtcaacatgctcatcaacgagaatgaagtgaaacagtggcgagaccaggcagagaagttccggaaagaacacatggagcttgtgagccgtctggagaggaaggagcgggaatgcgagacaaagacattggagaaggaagagatgatgcggacgctgaacaaaatgaaggacaagctggcccgggagtcccaggagctgcgccaggctcggggacaagtggcagagctggtagcccagctcagtgaactctcaacaggccctgtatcttccccaccaccccctgggggcccactcaccttgtcttcctcaatgacaaccaatgacctgccctcagtggtcaggcgtgcaattttggtctgcgccacataaccattctgaagcttttaggcgttggagaggaagttgggggagtgttagaactgttcccaattaatgggagctctgttgttgagcgagaagacgtaccagcccatttggtgaaagacattcgtaactattttcaagtgagcccggagtacttctccatgcttctagtcggaaaagacggaaatgtcaaatcctggtatccttccccaatgtggtccatggtgattgtgtacgatttaattgattcgatgcaacttcggagacaggaaatggcgattcagcagtcactggggatgcgctgcccagaagatgagtatgcaggctatggttaccatagttaccaccaaggataccaggatggttaccaggatgactaccgtcatcatgagagttatcaccatggatacccttactgagcagaaatatgtaaccttagactcagccagtttcctctgcagctgctaaaactacatgtggccagctccattcttccacactgcgtactacatttcctgcctttttctttcagtgtttttctaagactaaataaatagcaaactttcacctaaaaaaaaaaaaaaaaaaaaaaaagggaaagagagacattggctttgtctggcatcgtgggatccaatgtgtttgatatg

SEQ ID NO: 8144 - DNA, 1805 bp, Homo sapiens
gccattctgcctgcccctcagaacctctctgtactctcaaccaacatgaagcatctcttgatgtggagcccagtgatcgcgcctggagaaacagtgtactattctgtcgaataccagggggagtacgagagcctgtacacgagccacatctggatccccagcagctggtgctcactcactgaaggtcctgagtgtgatgtcactgatgacatcacggccactgtgccatacaaccttcgtgtcagggccacattgggctcacagacctcagcctggagcatcctgaagcatccctttaatagaaactcaagaactgcctttcttctgagtgtccacttgtgtccggaattggtgggttcttgatctcactgacttcaagaatgaagccgcagaccctcgcgccatccttacccgacctgggatggagatcaccaaagatggcttccacctggttattgagctggaggacctggggccccagtttgagttccttgtggcctactggaggagggagcctggtgccgaggaacatgtcaaaatggtgaggagtgggggtattccagtgcacctagaaaccatggagccaggggctgcatactgtgtgaaggcccagacattcgtgaaggccattgggaggtacagcgccttcagccagacagaatgtgtggaggtgcaaggagaggccattcccctggtactggccctgtttgcctttgttggcttcatgctgatccttgtggtcgtgccactgttcgtctggaaaatgggccggctgctccagtactcctgttgccccgtggtggtcctcccagacaccttgaaaataaccaattcaccccagaagttaatcagctgcagaagggaggaggtggatgcctgtgccacggctgtgatgtctcctgaggaactcctcagggcctggatctcataggtttgcggaagggcccaggtgaagccgagaacctggtctgcatgacatggaaaccatgaggggacaagttgtgtttctgttttccgccacggacaagggatgagagaagtaggaagagcctgttgtctacaagtctagaagcaaccatcagaggcagggtggtttgtctaacagaacactgactgaggcttaggggatgtgacctctagactgggggctgccacttgctggctgagcaaccctgggaaaagtgacttcatcccttcggtcctaagttttctcatctgtaatgggggaattacctacacacctgctaaacacacacacacagagtctctctctatatatacacacgtacacataaatacacccagcacttgcaaggctagagggaaactggtgacactctacagtctgactgattcagtgtttctggagagcaggacataaatgtatgatgagaatgatcaaggactctacacactgggtggcttggagagcccactttcccagaataatccttgagagaaaaggaatcatgggagcaatggtgttgagttcacttcaagcccaatgccggtgcagaggggaatggcttagcgagctctacagtaggtgacctggaggaaggtcacagccacactgaaaatgggatgtgcatgaacacggaggatccatgaactactgtaaagtgttgacagtgtgtgcacactgcagacagcaggtgaaatgtatgtgtgcaatgcgacgagaatgcagaagtcagtaacatgtgcatgtttgttgtgctccttttttctgttggtaaagtacagaattcagcaaataaaaagggccaccctggccaaaagcggtcaaaaaaaaaaaaaaaaag

SEQ ID NO: 8145 - DNA, 1003 bp, Homo sapiens
  misc_feature (134)..(134): n is a, c, g, or t
  misc_feature (164)..(167): n is a, c, g, or t
tacccccttacttagaagggaattcaccaagaggattaaaccagtggtttgatttggaagaccctggggtggggtagaaaaatttcactgtataaccctttttatttgtttaccctttttttaaacctatgaancttgtattcaattttataatacaaaaatgnnnnttattcttctaccaaagcctattattttttctctatacacaatgaagggctggaatccagatgccagatattcggagcattttctgcaggaagctaaattactccactggaatggaagacataaaccttgggacttccctagtgttcacaacgacttatgggaaagctggtttgttcctgaccctgcagggatatttaaactcaatcaccatagctgatataactctacccttaaaatattccctgtatagaaatgtggaattgtccctttgtagccaactataacattgttctttatgaatattacctttgatacatatgatccacaatataaaaaccaaaaactactgtgtgcaaattataccttggaccatataggcattgattaacttctttaagtacatgtgataactatggaaatcaagattatgtgactgaaaaacataaaggaagagacccatctagataacagcaatcaacctgcttaattctgaatgacaattatatccacaaatttttaaaacttctacatgtatttttcacatgaagatctccttaacaggttgccaaccttttcttttataaaactattacatttaaaatatggacgtctgaaaaataaaatattcatcatttttaaaaaaaaaaaaatgttactattctacatgttaaatataatagaaggtaaactgacctcaggtttaaaggggaaagaataccactcagtcttgctatagaaaaagcccgtaagttaaggataacaattcttaatatcttttattgtaaaagccatcagactttcaaatgaattttaaaatctttcaatattatttaat

SEQ ID NO: 8146 - DNA, 3007 bp, Homo sapiens
  misc_feature (23)..(23): n is a, c, g, or t
tatttttagagcatggatctcgnagcagaatttggctaaattttaacaaaatgttcttcagtaacacatctcatgatctgaagattgtgttacaaaaaatattatcaggccaaaatttgttcggaatacactaatttttgctcctctatatgtgaggaaaatgagactagacagatttaagtaattgacaacttacttaaagtagcaaagtcatggattgtattgacttttaaaaatatagtaaaagtcatatttaaactttatcctaaagtttaaatctaacagaacaactgaaatacttgaaatagacctataaaatagtaattaaaatgagaaatacataagatgataaataaaatgaaggtgaaggtattccagatctaccgaaaagattttcagtatcacagattattcataagaaattgagaaaaggaacaatcagaagttgcaaaagatggtatagccgaatataatggaaataggaaaaattagtcgaaaataaaggttgatttagaaatgaagaaaatgaatatatttcttaatacaaaataagtgggaaatgagaagttataccaataaaaagcatttacaaatttaggggatattgtaacccagtataattttctgacaggttggactttgaccctaatggacttactggtgaactttttcaaatgtttaaataatgtctatccatgtatcatgaaggacagtatgcttcaaattgtcttttgaggcagacatgttctcagtactaaaagacatttttagaaggattttattctcaacagatgcaaaatgcaaaataaaatattgacaaacaatacagcaacaaataatttactatcactcaggattataaggctggtgttaagcagaacagccattaaatcagcatcaaaagaacaaatagtaaaatccaaagtattaattacagataacttttcaaaaattcatcattcacccttgatttaattatttctctggcaattatttaatagacttctcggagtctgttaagtacttaaaccaagaactaccattattcctactgggaaaacataaacatttctcaagtggaaagtaaacagtgttggcactatttttatatatggttaaagagacctgtcattgcaataaaagccagcattcacaaaatgaggaagataaggaaagtagcataaatattttctattaacatggctttacaactgctaaaacttatagtataaaaatgtactaacaaagactaattcaagaagttgcaggatacacaatttttaaaaatctcatttctatctttagcaggtgacgaaactggcaattttaaaacaggtgtgtttggttattaatatatatgagacttttaaagaaagttatataactacatagagataaattaagaaagatgcctaaatagaagcaagtttaaagagctatatttttaaacatgaacaaactcccatgggagccatgccagtgtagtggaaaagtagtacatggggagatggggagtttttttgaaaaccagaattacagttctcatttcactacttaccagttgtatactcttgggaaagtcactcctagtatctatttcaccatctacagaagagaaatacttcacagaattattgtggggattaagttagataatgtgttttaaaatataaagctacatccaaagaaatgccaatatgtgacattagtatgaaatttactacagttccatttaacattccaactggttgctgtgtggaatatggcataattgtaataaattatttaggaaagcaagcaaagatgtaagtttttttaatttagggggaaaaaatgggagccttgctctccaaatccttaaaacatgctattaagcaacctttctgaatattctgtggtgccaagtagaaagtttaactgaaattaataagccaatggaaagaaagaaatattaataactgctggtggaaagactagctagatgtcagtgtggaaagattagatccactttacatgtgatattccaaatgaattaaaatgttaagtataaaaagaaaaatactacaagtctcacaccaatagtggtataaaggaacttcatggcaattggcaaggtagatcaactaagagaaaaagttttaaatgtgtagtaaataggaaaaagacaaaacaagatggaatttaaaagaagctatttgcattacacatggatgcactcagtttttgtaaaactatatgcatatccataagggtttgtactcttaggcaaatttataaagcgatcgtgtataaatgatataaaaaatcaatttgaatggtattcaaatttcctaatattaaaaatgcaactttgacttagttcatgctattgtattagcaaaactgttttaattgcatgtgtccttatagcagcagcattgtgtattagtagccttttaagagaactgtgtagaagactataaaaagggctttataactgatcttttgacatactcactttgagtggcatatgcccaggaaaatatttaaaagaaagaaaagctatttgtacaaagttttctagcagttccactcagataactttaagggggaaaaaagcccaacgattggaaatggttaagtaaattttggtgtattgctagtgctatcacagaatgttatatagccattcaataatattgatatatgtcaaattgtatgcaaaaaagtgagattcaaaaatgttaataagaacataaattgtgtttactgatacatgtgaaaatttaggtctacattgaaaagaatcagaagataacatgtaattcagtttaacattaggggttctttatttttcttctgttaaatattgatgtatgcaataaaaaataaaagattaattggtaaagtggtttactgaaggcccaggtaccggtccagttctgtacaaggtcctaaggaggtaaaaagaggggcttcaacggcgggaacgtccggtctggagccctgggctgaccccaaagcgaaa

SEQ ID NO: 8147 - DNA, 1383 bp, Homo sapiens
agcgggccatgttgttctctcgcgcgctggacgggagcagctggagcgggagcctggctgcgctaccgcggctgcctcctgctgtgcaggtccccggcacgaggctctgtcctcattgcgcccagacgggccggcccagagctcccgggtcgtctttcgtgtggccgcgagacactcttgcactcctgtaatgagcctggcactgtgatgaaacacttttcccgtgtcgtttgagtgcatcttctcaacaaccctaggagggttcttgaagcttttgagattaacaatggcaggaaaatcatcactttttaaagtaattctccttggagatggtggagttgggaagagttcacttatgaacagatatgtaactaataagtttgatacccagctcttccatacaataggtgtggaatttttaaataaagatttggaagtggatggacattttgttaccatgcagatttgggacacggcaggtcaggagcgattccgaagcctgaggacaccattttacagaggttctgactgctgcctgcttacttttagtgtcgatgattcacaaagcttccagaacttaagtaactggaagaaagaattcatatattatgcagatgtgaaagagcctgagagctttccttttgtgattctgggtaacaagattgacataagcgaacggcaggtgtctacagaagaagcccaagcttggtgcagggacaacggcgactatccttattttgaaacaagtgcaaaagatgccacaaatgtggcagcagcctttgaggaagcggttcgaagagttcttgctaccgaggataggtcagatcatttgattcagacagacacagtcaatcttcaccgaaagcccaagcctagctcatcttgctgttgattgttagattgttgatgcattctaaccaactcacacatatacacaaaatcaacatggggatggagaagagaattagcgtttgcagcagtgtatcatctactaataaaattaaactaatgttgctgcttcattagttggtgggagaagggacacatccactcttggaggaatatatttactcaataatggcaccttacatttataaattgtaacagttgtctaataacgtttctttaatttaaatatgtaagttgcagagctaataaatgaaatgaccaagactttaattataataaaaataagaaacttgactattctagaagttatacttggattttttcctgggaaaatggagaactactttttatatgtgtatgtttttatgcaattagcattgtattcttggttcagggaaatactttcctaaagcaataatgttagatattaaagattaaaatctaatgtaatagcaaaaaaaaaaaaaaaaaaaa

SEQ ID NO: 8148 - DNA, 6947 bp, Homo sapiens
  misc_feature (2975)..(2991): n is a, c, g, or t
gacaacacctcacaaaagaaacgcagagatgttaaatcaactgcacattaaaagcagggatgctttctttacctagaacgagttttagatggagttgtcgaaaattttattatgttaagagaaattcgtgacatcccaggaactctaaatggtttatatctctggctgtgccaaagactttttgtaagaaaacaatttgcaaaggttcagcctattttgaatgtgattcttgcagcctgccgacatttgaccataacggaattatatcacgcagtatggaccaaaaacatgtcgttaactttggaagattttcaacgcaagttagatatcctctccaaacttcttgttgatggactaggaaatacaaaaatactgtttcattatagttttgccgagtggcttctggatgtgaaacactgtactcagaagtatttatgtaatgcagcagaaggacacagaatgttggctatgagttatacctgtcaagccaagaatttaacaccattggaagcacaagaatttgcattgcacttaattaactcaaacttacaattagagacagcggagttagctctgtggatgatatggaatggtacacctgtcagagattccctttctactttgatacccaaggaacaagaagtgctacagctgttggttaaagctggggctcatgtcaacagtgaagacgatcgcacatcatgcatagttcgacaagccttagaaagagaggattccattcggacattattagataatggagcttcagtaaatcagtgtgattcaaatgggagaacattattggctaatgctgcatatagtggcagtcttgatgtagtcaatttacttgtctctaggggagcagatttagagatagaagatgctcatggacatacaccactcactctagcggctagacagggacataccaaggtggttaattgtttgattgggtgtggagcaaatattaatcatactgatcaagatggttggacagcattaagatctgctgcttggggtggccatactgaggtagtttctgcactactttatgctggcgtaaaagtggattgtgcagatgctgatagccgaacagctttgagagcagcagcatggggaggacacgaggatattgtactgaatttgctacaacatggcgctgaagtgaacaaagctgataatgaaggtagaactgctttgatagcagcagcatacatgggacatagagagattgtggaacacctactggaccatggagcagaagtaaatcatgaggatgttgatggcaggactgcactctctgtagctgcactttgtgtgcctgcaagtaaagggcacgcatcagttgttagccttttaattgatcgaggtgctgaagtagatcattgtgataaagatggcatgactccactgctggtagctgcctatgaaggacatgttgatgtggttgacttgcttctagaagggggagcagatgtagatcacacagataacaatggccgtacacccctcttagcagcagcgtctatgggtcatgcatcagttgtaaatacacttttgttttggggtgcagctgtggatagtattgatagtgaaggtaggacagtcctcagtatagcttcagcacaaggaaatgttgaggtggtacgtactctactggatagagggttagatgaaaatcacagagatgatgctggatggacacctttgcacatggcagcttttgaagggcacagattgatatgtgaagcacttattgaacaaggtgctagaacaaatgagattgacaatgatggacgaatccctttcatattagcttcacaagagggtcattatgattgtgttcaaatattactggaaaacaaatccaacattgatcaaagaggttatgatggaagaaatgcactgcgggttgctgcattagaagggcacagggacattgttgaattgctttttagccatggtgctgatgttaactgcaaagatgctgatggtcggcctacactttatatcttggccttagaaaatcagcttacaatggccgaatattttttagaaaatggtgcaaacgtagaagcaagtgatgctgaaggaaggacagcacttcatgtgtcttgttggcaaggccatatggaaatggtgcaggtcctgatagcataccatgctgacgtcaatgctgcagacaatgaaaagcgctctgctttgcagtctgcagcctggcagggccatgtaaaagtggttcagcttctgattgagcatggtgctgtagttgaccatacatgtaaccaaggtgcaactgcactctgtattgcagcccaggaagggcacattgatgttgttcaggtcttattagagcatggtgctgatccaaaccatgctgatcaatttggacgcactgctatgcgtgttgcagccaaaaatggacattctcagataattaaattattagaaaaatatggtgcatctagtttgaatggctgttccccatctcctgttcacacaatggagcaaaaacctctacagtcattgtcttcaaaagtgcagtcattaacaattaaatcaaatagctctggtagtactggtggaggggatatgcagccttcgttacgtggtttacctaatgggcctactcatgcttttagttctccttcagaatctccagattctacagttgaccggcagaagtcatcactgtcaaataattccctgaaaagctcaaaaaattcatctttgagaactacttcatctacagcaacggctcaaacagtgccaattgatagctttcataacttgtcatttacagaacaaattcagcagcattcattgccacgcagtagaagtcgacagtcaattgtttccccatcttccacaacacagtccttaggacagagtcataattcaccaagtagtgaatttgagtggagtcaagtaaagcccagtttgaagtcaactaaagcaagtaaaggggggaaatnnnnnnnnnnnnnnnnntctggatcagctgggaaaaaagcgaaacaaagtaattcttcacagccaaaggttttagaatatgaaatgactcagtttgatagaagaggacctatagccaaatccgggactgctgcaccacctaaacaaatgccagcagaatctcaatgcaaaattatgataccttcagctcagcaggaaattggtcgatctcaacagcagtttcttattcaccaacaaagtggggaacagaagaagagaaatggaataatgacaaatccaaattatcatcttcagagcaaccaggtttttcttggtagggtttcagtcccacgaacaatgcaagatagagggcatcaggaagtgttggagggatacccttcctcagagacagaattaagccttaaacaagctctgaagcttcagattgaaggttctgaccctagcttcaactataaaaaggaaacaccattataaaagtttcctattctgtgaaacagaagacattgtgatggagtggttcttcagctactggatggaaacatatgcctgttgatttgctgaaaaaacaaaaaaaatgaagaatgtgatctctgcagtacagttaccttaattactgtaatgtgcctaaatagtaaggctgccttctcaatgtaaccctctgtgcttaaaaaatttcattttgtgtgctttgtattcactacacaggaataagcactttttaaaaatgcagatacatactgcagttccctgataaaagctgaaaagaaaatttgagtattttaagttaagatgtgataaaaaatgtgcatgtgccataatcaaatatatatgaaaaggcagtgttccttgtatttatttttttttctttttgtggcaaaagaaacttaaacatactgtttcagtcacattgcattgtagtgtatggcctgtttcttgtatctttaaagacgttgctcaataaaacaaatcttgcaactgttctatgttcactacaccttcagcattggataaaaatcattttctatataaatatcacattgaaatgaaaaaatgatttcttggcagtttaaaaaaaatattttatagtagtttagggagctgctttaagtagtttaaatctggattttcccagtagaattcttctcatctctggctaaacatgtcagaacaaacaaccaaccagtctgtaggcagaacaaagtcctatttcatccgctgggatacaatttcatcttccattcactttgtcattccacctctaagaagacagactatcattcctgaggcatgaaaattctcagggacaaagccatgcctcagtcacatgtgtgtgcagagagaaatgcacctgtctatctaagggtagatttttgatccctgaataattcattgactaaactgacctcttcctcctggctaaataaattaattttgctggcttctctctcagcggtttctattttgtaaattgctgcatgaccaaaatagccccactcaaaatcaattggattaattttaatggtttggttggatgaatattctggatgaatataaaatgtgctgcccttcacagatgacaccactcccctgtcaatcatagcacatgtgtactttttattgttacttaatagtgatggatttgcacttttctatcctcatactctttcctgttttcttctttgtacaattgcatgcaggagggctggatgccagggttaagagagaaattcatgacaaggaaggtaaaattggttcaaatgagcatgtgtcccacagccttagtctccttactcttaaatcagtggagctgtagcttagatgggtcgtttatatgtctggaaaagttgtcataacagtttagaagccaaggttgtggatttgatcttagaatgggcctgttaatcttatagaacccagaaattctgttcttttcatgtactgttgatgaggaatgaggaaagagaatttggagattcagcacaaaaccattgctacttctagaacaaaatctttagaatatgtcctaataacaaaggtcagtaatgtcatcttcatatatgaaggacacatgtgatacattgttcgtggaaatagaaatgtataattatgataaatgtttcacttgaatcttattgtaaggcttttcttgcttttattttttaaagtcagcaaaactcattttgtctgtcatctataagtcatagtgaggactacgagataagttgataagttcaattgatattaaggtgacatggcaatattaataactcaaatgtgaatgtttcaagtattgaattcttgtccctatgggacatttattaaataaaattaatgggactcttgcaaagtagccttaaaagtgttaatgagtctattaataaatatgaacacatactattattagaaccaactttactcatatctcaaatacagtacatttacattactgtagaggatgaagctctaatttctattacatgtaattttctttagaaagagaaccctgaaagctgccagtttttctattaactttgaattattgaaattgtatttatttaattttattgtttttacaaaattgcaccttgtgtccaaagggcgaagatatgacattgcataagggatttatgtttttcaaagagctaactgttttcatatccatactatatacacttgaagcaattggtaggaagagaacctattggaaaaatacgattttcaaaagtaagtattcctcgggatgtttttatataaattatgttttggaatagaacataaatgactttgagttaggataaggatgataggatgggtgctggagatgccctgccttgcttatttgtttctgtgggggatttaatactataaatgaaaatggcttctgctccattaaaaagtaaaaattgtcctccaaatataaaactccttaatagatatttttgaaattaaaatctttaaattttataaatcagctgttgccactacacaactatgatggcatgtgcttataacatttttataacattccgtctgtgtctattccctaaatatcatgagtttataataaggaaattgataaaaatacagtaatgaaataaaaatctgaatgtttctaagaaaggttttggaaggaaaaatgacctgaaatcagtgcgtactgcaaagtacagccaataatttttgttctttgttttcacccccaccctcatctggaatttctcaccaaaaatagtttgatacttaaaaaacagaagtaaatacttttctcaatattgttttggctatgcaaatatttgttttgcttaatgtcctccatttacacttctcagcaaatgtagttgcaaacaaatgctttctttttatttttcccttggtttgaggtatgtaaatagccaaaaatgtacattgaatttcacattgtaaaagttttattttatcccttgtatgatattactcaaaaaatccctgtgtatatgaaagtgcataataaatatatttgctttacagagaagatcttgttttaattttgtccttgaaccagtagaacatgcatgatatgcatatagcataaacaactgttagttgttttaagttattatcttaaataaatcctgagcaaatgaatttggaaacattttgcaaagaagaaagtgaaatataacactgtccaaaggaaggtagaaaaacaaagatttactgtttatgtcttcctaagcctttttaaagacttaatgttcttttcccccccccgtgactgattatatactatatcacaccatgtcaggttttgtgcctctgagaattgcagtaatccaataacttttgtatatgtgtgctccttgatcatcagaatattatggccatcttatggcggatattttgggagtttattgcaaacgtggtcattcattttctaaataaaatttgtgtgtttctttaaaaaaaaaaaaaaaaaaaaaaaaaatagagggggg

SEQ ID NO: 8149 - DNA, 2373 bp, Homo sapiens
  misc_feature (29)..(44): n is a, c, g, or t
  misc_feature (810)..(810): n is a, c, g, or t
caggccggaccacttgctatatgtaggcnnnnnnnnnnnnnnnnaaatacacttactgtgttctagaggcagccctttcttatgcagaaaatacaatacgcactgcatgagaagcttgagagtggattctaatccaggtctgtcgaccttggatatcatgcatgtgggaaggtgggtgtggtgagaaaagttttaaggcaagagtagatggccatgttcaactttacaaaatttcttggaaaactggcagtattttgaactgcatcttctttggtaccggaacctgcagaaacagtgtgagaaattaagtcctggttcactgcgcagtagcaaagatggtcaaggccatggaaaaagcagaaatttaccaagaaagctgatacccatgtatagttcccactcatctcaaatacatctgctatctttttaagctaagtcctagacatatcggggataacatgggggttgattagtgaccacagttatcagaagcagagaaatgtaattccatattttatttgaaacttattccatattttaattggatattgagtgattgggttatcaaacacccacaaactttaattttgttaaatttatatggctttgaaatagaagtataagttgctaccattttttgataacattgaaagatagtattttaccatctttaatcatcttggaaaatacaagtcctgtgaacaaccactctttcacctagcagcatgaggccaaaagtaaaggctttaaattataacatatgggattcttagtagtatgtttttttcttgaaactcagtggctctatcnaaccttactatctcctcactctttctctaagactaaactctaggctcttaaaaatctgcccacaccaatcttagaagctctgaaaagaatttgtctttaaatatcttttaatagtaacatgtattttatggaccaaattgacattttcgactattttttccaaaaaagtcaggtgaatttcagcacactgagttgggaatttcttatcccagaagaccaaccaatttcatatttatttaagattgattccatactccgttttcaaggagaatccctgcagtctccttaaaggtagaacaaatactttctattttttttttcaccattgtgggattggactttaagaggtgactctaaaaaaacagagaacaaatatgtctcagttgtattaagcacggacccatattatcatattcacttaaaaaaatgatttcctgtgcaccttttggcaacttctcttttcaatgtagggaaaaacttagtcaccctgaaaacccacaaaataaataaaacttgtagatgtgggcagaaggtttgggggtggacattgtatgtgtttaaattaaaccctgtatcactgagaagctgttgtatgggtcagagaaaatgaatgcttagaagctgttcacatcttcaagagcagaagcaaaccacatgtctcagctatattattatttattttttatgcataaagtgaatcatttcttctgtattaatttccaaagggttttaccctctatttaaatgctttgaaaaacagtgcattgacaatgggttgatatttttctttaaaagaaaaatataattatgaaagccaagataatctgaagcctgttttattttaaaactttttatgttctgtggttgatgttgtttgtttgtttgtttctattttgttggttttttactttgttttttgttttgttttgttttgttttgcatactacatgcagttctttaaccaatgtctgtttggctaatgtaattaaagttgttaatttatatgagtgcatttcaactatgtcaatggtttcttaatatttattgtgtagaagtactggtaatttttttatttacaatatgtttaaagagataacagtttgatatgttttcatgtgtttatagcagaagttatttatttctatggcattccagcggatattttggtgtttgcgaggcatgcagtcaatattttgtacagttagtggccagtattcagcaacgcctgatagcttctttggccttatgttaaataaaaagacctgtttgggatgtaaaaaaaaaaaaaaaaaaaaaaaaaggagagcgaggacgggcaaaaacagcagagaggagaaaggaagagcaacagaaagagagaacgagagaggaggagcaggccagcgaggcggaggagagggaagcaagcagcgggcgcgcggcgaagacagggcgcggcgcagcagcaggagagggggggaggcgggcgggacgggagggggggacccgagaggagcgggaagaggaggggcgggcaggaagggccgcggaggaggggaggaacgaagcgaagcggggaggaga

SEQ ID NO: 8150 - DNA, 3327 bp, Homo sapiens
ttgcgcaggcgcatccgaattcgcggccgaagtcggcgatctcttggagacggcgacccaggcatctggggagccacagaagtcgtactcccttaaaccctgctttgctccccctgtggatgtaaccccttagctggcattttgcatctcaattggcttgtgatggaggcgtctttggggattcagatggatgagccaatggctttttctccccagcgtgaccggtttcaggctgaaggctctttaaaaaaaaacgagcagaattttaaacttgcaggtgttaaaaaagatattgagaagctttatgaagctgtaccacagcttagtaatgtgtttaagattgaggacaaaattggagaaggcactttcagctctgtttatttggccacagcacagttacaagtaggacctgaagagaaaattgctctaaaacacttgattccaacaagtcatcctataagaattgcagctgaacttcagtgcctaacagtggctggggggcaagataatgtcatgggagttaaatactgctttaggaagaatgatcatgtagttattgctatgccatatctggagcatgagtcgtttttggacattctgaattctctttcctttcaagaagtacgggaatatatgcttaatctgttcaaagctttgaaacgcattcatcagtttggtattgttcaccgtgatgttaagcccagcaattttttatataataggcgcctgaaaaagtatgccttggtagactttggtttggcccaaggaacccatgatacgaaaatagagcttcttaaatttgtccagtctgaagctcagcaggaaaggtgttcacaaaacaaatcccacataatcacaggaaacaagattccactgagtggcccagtacctaaggagctggatcagcagtccaccacaaaagcttctgttaaaagaccctacacaaatgcacaaattcagattaaacaaggaaaagacggaaaggagggatctgtaggcctttctgtccagcgctctgtttttggagaaagaaatttcaatatacacagctccatttcacatgagagccctgcagtgaaactcatgaagcagtcaaagactgtggatgtactgtctagaaagttagcaacaaaaaagaaggctatttctacgaaagttatgaatagtgctgtgatgaggaaaactgccagttcttgcccagctagcctgacctgtgactgctatgcaacagataaagtttgtagtatttgcctttcaaggcgtcagcaggttgcccctagggcaggtacaccaggattcagagcaccagaggtcttgacaaagtgccccaatcaaactacagcaattgacatgtggtctgcaggtgtcatatttctttctttgcttagtggacgatatccattttataaagcaagtgatgatttaactgctttggcccaaattatgacaattaggggatccagagaaactatccaagctgctaaaacttttgggaaatcaatattatgtagcaaagaagttccagcacaagacttgagaaaactctgtgagagactcaggggtatggattctagcactcccaagttaacaagtgatatacaagggcatgcttctcatcaaccagctatttcagagaagactgaccataaagcttcttgcctcgttcaaacacctccaggacaatactcagggaattcatttaaaaagggggatagtaatagctgtgagcattgttttgatgagtataataccaatttagaaggctggaatgaggtacctgatgaagcttatgacctgcttgataaacttctagatctaaatccagcttcaagaataacagcagaagaagctttgttgcatccattttttaaagatatgagcttgtgataatggatcttcatttaatgtttactgttatgaggtagaataaaaaagaatactttgtaatagccacaagttcttgtttagagaccagagcaggattaataatttattttaacattttagtgtttggtggcacattctaaaatatagattaagaatacttaaaatgcctgggatagttcttgggactaacaacatgatcttctttgagttaaacctacctaagtagattttaggtgggttcctattaggtcagatttttagcttccctaattacctttcactgacatacagaaaaaggagcagttttagttttaattaattaaaattaacagatgtgatgaggattaaatgaatcaaaagacttaatttgtagattcttttagagttatgagctaggtatagtttggggaaactcaacctggtgctggtgctcttaacaattttgtaaataaagaagataatttccttttctagaggtacatattaggccttttatgaacactaaaacaatgaggaaatgttggtcatggggcaaagtatcacttaaaattgaattcatccatttttaaaaaacacttcatgaaagcattctggtgtgaattgccatttttttcttactggcttctcaattttcttccttctctgcccctacctaaaacattctcctcggaaattacatggtgctgaccacaaagtttctggatgttttattaaatattgtacgtgtttacagttgggaatttaaaataatacatacactggttgataaagggaagctgcaggaccaaggtgaagattgatagtccaaatgcttttcttttttgagttgtatattttttcacaccatcttagatataattaggtagctgctgaaaggaaaagtgaatacagaattgacggtattattggagatttttcctctgcgtagagccatccagatctctgtatcctgttttgactaagtcttaggtgggttgggaagacagataatgaagtaggcaaagagaaaaggacccaagatagaggtttatattcagaaatggtatatatcaatgacagcatatcaaacttcctatgggaaaaagtctggtgggtggtcagctgacagatttcccatttagtagtcatagaatacagaaatagtttagggacatgtattcattttgttattttgagcattgataggtcagtatatctacctaatctgtttggtaagtataggatatataaaccattaccattgatctgtcttatgccataatcttaaaaaaaaattgaatgctcttgaatttgtatattcaataaagttatccttttataaaaaaaaagtcgacgcggccgcaaaaaaaactttggggggggtgttggccgaaaaagtttttaagaaaatgtgggggggggggcccaatgggggaaaggggatgggggtcaagagaaagt

SEQ ID NO: 8151 - DNA, 2116 bp, Homo sapiens
gtgtatgcagaaaggcgactgtcctaggagtatgaccaaccctccttcaatgctaggcttcagccacctcctcctgaaagctgtcctgtcatccccacccctaccccttatcaactccaggctagagtgggagacccttctttttgctccttctctgtagacccataaatgcccctgcatttggagacccataaatctgatgcctctgtggcaactgccatgccatctgtcatatttaaattttcagctcacatcctgccagccaggccatgagcttttttgaggttaccaggtagtgttagtctcttcagtgctgacacatattaggggtttaacaaatgtttgttgattaaaagaagggatccagaggggccacttttcctcttcccagtgggagctactggttggcattaaagcaaagactgaagggagagaaggaagccaagcgggctcttttggatgcgaggcataactacttatttgcaattgtggcttcctgtttggacctgaacaaaaccgaagtggaggatgccattcttgaagggaatcagattgaaagaattgatcaacttttgctgttggaggtctccgacacctcatgttttactatcaagatgtggaggaagcagaaacaggacaacttggctctctaggaggggtaaatcttgtttctggaaagattaaaaaacctaaggtgttcgtgaccgagggaaacgatgtggctcttactggggtatgtgtgttcttcatcaggactgacccttccaaagccatcacccctgacaacatccaccaggaggtgagttttaacatgttagatgcggcagatggaggcctgctcaacagtgtgagacgtttgctgtcggacatcttcattcctgctctcagagccacgagccatggctggggcgagctcgagggccttcaggacgcagctaacattcgccaggagttcttgagctccctggaaggctttgtgaacgtcctgtcgggtgcacaggagagtctgaaggagaaggtgaaccttcgaaagtgtgacatacttgaactgaaaaccctaaaggaacctacggactacttgactctagcaaataaccctgagactttgggaaaaatagaggattgcatgaaagtatggatcaaacagacagaacagcgtctccagccccgtgcaatggctcgtgtttttccccgcgcatttgcaggttcttgctgaaaacaatcagctgctgaaggaagcggatgacgttgggccacgagcggagctggagcactggaaaaaaagactctccaagtttaactaccttttggaacaattgaaaagcccggatgtgaaggctgtgctggcagtgcttgcggcggccaagtcgaaactgctgaagacttggcgggagatggatattcgaatcactgatgcaactaatgaagcaaaggacaatgtgaaatacttgtatacacttgaaaaatgttgtgaccctttgtacagcagtgatcccctatccatgatggatgctattcctacacttataaatgcaattaaaatgatctatagtatctctcattactataatacctctgagaagatcacatctctgtttgtaaagatgacaaatcagattatatctgcatgtaaagcctatattaccaataatggaaccgcttccatctggaaccagccacaggatgttgttgaagaaaaaatactatctgcgattaaactgaaacaggaataccagctctgctttcacaagacaaaacaaaagcttaaacaaaatccaaatgcaaaacaatttgattttagcgagatgtatatttttggaaaattcgaaacttttcaccgacgccttgccaagataatagacatctttacaaccctcaagacgtattcagtcctgcaagattccacaattgaagggctggaagacatggccactaaataccagggcattgtggcaaccataaagaaaaaggaatacaatttcctagaccagcggaaaatggattttgaccaagattacgaagagttttgcaagcagactaatgaccttcatgtaggttgtataataaaattcctgttgacaaaaaaaaaaaaaaaataaaaaaaaataaaaactat

SEQ ID NO: 8152 - DNA, 4186 bp, Homo sapiens
  misc_feature (4)..(6): n is a, c, g, or t
ttannnggatcgagaggcctgggcgtgcggcggcggtgggagcggcggctgcagaatcagcatgcagcagaaacatgctggcgtggtactctgtgccccgcgtaccggaggcatgccgactgcgccaccccaccctcgcacggccgggcgggacccgcgccaccagcccggacctccgtcgtcccgctggcgaccaaaactcccgctggccccaccgctgtgactactctggactcgcccgcagagtttgcccgccggggagggtggccgattggcgtgagcgcactcctgctgttttccccaccatctcgtggatgtcgtccctcgggtggtgagagaactttgcagtgggctggagcgccctttgcggagaagcacacgaaggtgaacggaccggacagacagaagaccgagaacacgaaggagctcggaagaagggtccggagcggccggtccggccgtgcagggcgagtgcgcccgatgcgcgtcgccctgatgctccccgggctcgaggagcattgggcacttgcgggactgctcgcggtggagtagccccgtcgggcccggagggtttgtgcaaccgccggagaacaccgagtgctggtcgcacggtgcgtgccgagccgtctcccggcgcgacctccgaagtttcccccgcctcgtcatccgtcgctccccgtgcaggaggccttcgcttgcgtcttcgacctcggctcccgtttgccgtccgggagcctgggagcacccgggcgaaggcgctgccgaatcttgcgggagtcgccccgaaagcgtcgggtttgtgtggggttagcgggggccgccgcgccacctgcacctcgcccgccgccgcctcggggaaagcccgaagaggaggcacgaggaggagaagagcaaagaaaagcagtccgtctggatttgtttgcccaggactggcgccgcgcacgcggatcgccgaggggagtgcggtcggagtcaccgcgcccccgcctccccgcccgggcagctgaggccgggggttggagcgctgcccccgcgcacagtccccgagcgcccgacgtctccgcgcaggttcttgaagcagctgggcctggggcgcccactaatgtggccctgagggccggagcccgcaccgacgggagcgggagccggagcagctgcgggcgccgagtggccggtgcgcccggcggagcgcgcgtgcgtggccagcgcgctccccgcttctgcttggctttccggcttaattttcctcggcgggattaaagttggaaattgaccggagaattgagttgccggggaacagagccccggccgccgccagagcgatgttcccgcagagccggcacccgacgccgcaccaggctgcaggccagcccttcaagttcactatcccggagtccctggaccggattaaagaggaattccagttcctgcaggcgcagtatcacagccttaaattggaatgtgagaaactggcaagtgaaaagacagaaatgcagaggcactatgtgatgtattatgaaatgtcatatggattaaacattgaaatgcacaaacagactgaaatcgccaagagattgaatacgatttgtgcacaagtcatcccatttctgtctcaggaacatcaacaacaggtggcccaggctgttgaacgtgccaaacaggtgaccatggcagagttgaatgccatcatcgggcagcagcagttgcaagctcagcatctttctcatggccacggacccccagttccccttacgcctcacccttcgggacttcagcctcctggaatcccgcccctcgggggcagtgccggccttcttgcgctgtctagtgctctgagtgggcagtctcacttggcaataaaagatgacaagaagcaccacgatgcagagcaccacagagacagagagccgggcacaagtaattccctcctggtcccagacagtctaagaggcacagataaacgcagaaatggacctgaattttccaatgacatcaagaaaaggaaggtggatgataaggactccagccactatgacagtgatggtgacaaaagcgatgacaacttagttgtggatgtgtctaatgaggacccttcttctccgcgagcaagccctgcccactcgccccgggaaaatggaatcgacaaaaatcgcctgctaaagaaggatgcttctagcagtccagcttccacggcctcctcggcaagttccacttctttgaaatccaaagaaatgagcttgcatgaaaaagccagcacgcctgttctgaaatccagcacaccaacgcctcggagcgacatgccaacgccgggcaccagcgccactccaggcctccgtccaggtctcggcaagcctccagccatagaccccctcgttaaccaagcggcagctggcttgaggacacccctggcagtgcccggcccatatcctgctccttttgggatggtcccccacgctggcatgaacggcgagctgaccagcccaggcgctgcctacgccagtttacacaacatgtcgccccagatgagcgccgcagccgccgcggccgccgtggtggcctacgggcgctcccccatggtggggtttgatcctccccctcacatgagagtacctaccattcctccaaacctggcaggaatccctggggggaaacctgcatactccttccacgttactgcagacggtcagatgcagcctgtcccttttccccccgacgccctcatcggacccggaatcccccggcatgctcgccagatcaacaccctcaaccacggggaggtggtgtgcgctgtgaccatcagcaaccccacgagacacgtgtacacaggcgggaagggctgcgtcaaggtctgggacatcagccaccctggcaataagagccctgtctcccagctcgactgtctgaacagagacaattatatccgttcctgtaaattgctacccgatggctgcactctcatagtgggaggggaagccagtactttgtccatttgggacctggcggctccaaccccgcgcatcaaggcggagctgacgtcctcggcccccgcctgctacgccctggccatcagccccgattccaaggtctgcttctcatgctgcagcgacggcaacatcgctgtgtgggatctgcacaaccagacactagtgaggcaattccagggccacacagacggagccagctgtattgacatttctaatgatggcaccaagctctggacgggtggtttggacaacacagtcaggtcctgggacctgcgcgaggggcggcagctgcagcagcacgacttcacctcccagatcttctccctggggtactgccccaccggggagtggctggcagtgggcatggagagcagcaatgtggaggtgctgcacgtgaacaagcctgacaagtaccagctgcacctgcatgagagctgcgtgctgtccctgaaatttgcttactgtggtaaatggtttgtgagtactggaaaagataacctcctcaatgcttggcggaccccctatggagccagcatattccagtccaaagagtcctcgtcagtgcttagctgtgacatctctgtggatgataagtacatagtcactggctcgggggacaagaaggctacagtctatgaagtcatctactgaaaacattatgtggtttaacgtttatagttgaattgggccaaaatgtttcgaatttatagaaatagaaaagttgtaactttaaaagagaaaaaaaattacaaacacctgtttccaaaccttgacagaaaactactttgagtctacaaagaggaggcgacaagtccatcagcagaaagtcacctgtctacatagaccaaatggagcaccaaggccaagcggacagaggggccatgggttgtaggattgaggaacggaatctgccgactcacatgacagcccattctttctttctgggtgatctggggatcacgccttgcccaagtgtgagattacctttctgttccttgcagttcacctcactttccgtcctttgtagagcagtggtgtctccaatgaacttgtttcctggttttgcatcttgtgaaatgtttttttgtatttttgttgaaggttaaacatttgtataaattgtaaatatatttggtttattacagtaaaggctttagtaccaataaaaaaaaaaaaaaaaaaaaaaaaaaaaaaaaaaaaaa

SEQ ID NO: 8153 - DNA, 744 bp, Homo sapiens
  misc_feature (720)..(720): n is a, c, g, or t
acggcatccacggaaggaattttatctttatggtacctagatgatttcctttttattactggaattaaatatacttaaataacatacagagcttaatgaaaaagatcatgaatcactccaccataagaattatcaggacatgataaaatcttatgtatcttaatggtaaaaacaatctgattattaggtctttgtttgaggcagtttatctacagttcaaaaaaatgctttcactgattacattccaaagtatttcttcatttgtcagcaggagtgtctggcatttaattaaaatatattcctctaactataaataattgaatggttttaaatctatggctaatattggcaaaccgataaataaccaaataatgtaagaactagaattatcaaaacacttttgcgaacacagttctgcttggagggctccacggaggaagtgcctcactttcaagaaaggaatgacgtttcttctgttttcgttcaattctttcttgtttttccttattttccagccatttttcatattcattaatagcttgtttatctttatcttttttctcagctcttttcagttcttcctttcttttctcatttattttttctttttccttttgcttgaaaaaagcttcctttttttcattccatttctcaaacagagttaaattatctttctttttctcgggcacagtttcctacctccttctgttctttgctctntcatattctctctcctttctattt

SEQ ID NO: 8154 - DNA, 3774 bp, Homo sapiens
  misc_feature (921)..(931): n is a, c, g, or t
tcgtgccgaattcggcacgagagaacatcagtaaacagataagaagtaggagacaggattggcattatatctatggtcatgtcgaggagggacaagattgagtggtgagaagattagaatttggatagattctaaggccctggcatgactctacagggaaccagggaagtgatgtgtctcttcttcagtgcgattctctctccgaagatagctttggcagcccccgccggcgcactcgacctacaggaaagttgctcccgagctgtggaggggcgtcatcgcctcctagcaacgctcctagcaaccgggtaacatctgctccctgcggtccaatgcgagctgagaacagctgcgcgcccgcctagcgctgcgaacccggagtgagaggcgcttcagagactggagggacggacctgcaggagccagggctggccgccgagctgcagttgccgctactgccgctgtcagcgcccgactgaagagtgacagccgcaaaagcaggagtgagcaccgaaccccgcgcttctacctaacaggtgcatgcgccgatctggtgagtggacccagctcacaagatctcaggtaaccattcatgagcctgaggctgtgagaaatgctcgctgtgcaaaggggaactctcaccagattttctgaaactgttctagaaatacacttttcggattgattcagcattaccagcttatccaacaaaagtattaacatatacattaacaacgtcgaaagtagcctactttaagagaaaatatgcagaagaagaagatttacatcaagattaccatgggtattttccaaaacacctgatattacctgaggacagaacttgcattctcaaactttctctggagaagctcaggtttcttgaagacccagaaacctacttaagaaggtctgtgttaattnnnnnnnnnnngaggaagatacatctagagacggagaaagagagctatgaatactttaaagaagctccctgttataagactgcatattctgatacaagaaaacggctgaagtttatggtacaggaatgctgttctcagtctctctattatgaagagctgcattcgtatcatattgtgccttatgcttcggagaatgccatttatgaaatgggctacactagcagccacttggagcaaaattctcagttgcttatttataaaatgaattaaagtaactgttaagtccattgatactttgtttctaaatgcttgaactgtttatagtgaagatgttaatataaggcactcattaccagtgcacttgatatcaaagatgagatgcatgctgaactgattggagagagcaatggttattactcagcagtccttagaatcatcaaattgaatagaaaatatgttcacatatgataaagcggtcaattagtgctttagaagcaaagattttttttaaacataagatgtgtaggaaggggcctacgttaaacaattacacagatgaaaaattttcttttatgccttgatttccaaattctgccactcttactggaaagtaatgaaagtaacagattaaattgataatgccatgtccctgaggatgaagggtggaacacatttaattttctgtaaatgatatgaggaagggctggttctttctgaagtgctttgacttgtcaagcattgtgccaaataattgacaccattctccttttaccattagtagcaattcgagatggggcaaagacactgcaactaaactgctgaatgtaacaaccagattactccaaactgatccattgtactattttgcggggagggcttagacttttctctttaaaagtgaattttaacgaaatagccttgcagatgggcttatctataagttctacaggttggttaaaatttgtggtgggcctttagttagccgtttacattttatttgtttttttttataggctgtgaagctcaggaaaagggtaggcaggtaaaatttgtttttaatgagttgatactttttagaaaccttatctgcaaaaattaatgagaacaacaaattccacatgatgttatttcttcatctagctaagagtacatttaaggctgcctggatgaaactttgcactgatttttgtataatagttgatcattcactatttgacaaattgtttcagaatgcctttggtggtgaagtttagataagtccctatgttttgcaattttacagataattatttaacaagttggatagattcatgaaattgtttgaagtggttcatactgttctttcaggtttgagtgagatgtcagatttcagtgtctgaagttttgtcctatggagcatatcatttaaagaattgtcattaactgataaaacagattggaaaaactaggtgccaaaggtgtatttaagaaaataccaaagactcaaagatgagtgttaggaagactatgataatgaagataagaatctaaagtaaggattgcataggacatagaagaacattgttaaaggggtttggaatgatttgcttactaatgtactttcagaacactttatacataataatggtaatcaagggcactgctttaaatgaagatactacagacctttaggaatcatatgccttggaaaacaatctatgtatggtgacttgtcaacaaagtatcttccctagttggatgccaacttgtaaccaagaagactttcttctattcaagagaaatttggttttagttttgatttaatacttggtccctctaattaatcactggggtgattaacatgaattctgttggtataaagagtattggttccctaattagcctgcattgttgaagaccacatagatgtattactgataagactatgaggctcatgtttaattactcaatcaaaattaggaagaaatgctttggaagaaactaaaaaattacaatttaggttaatttttaaaggcaatttagtatacatgatgagctagctttgaaatacagatttaaatgtttaaaaattaatttgagggcaagatttggtaccaaagtttcaaaaattttatttcactgcttataaaatactttatcagaacacttattttaaaaaataacatcttatttgaaaaactccaaatttgatgggatagttacaccatcatacaattttaaaggtagaattagctttctaatactttaaaatattttctgaaatgaacatttcacttggtttaggaccgtgtctgtaagtaaaagacaccaatgctaatagatatgacttacaaaaatgccacatatcgaaattgattgaggattgaaatatatatactttggcattgagaagagaggaagagaaaaaaataaaaaaagtgtgacattgtaatatttattgtatttaataaatcttgaagaaagaactcttgagcaatgaaccagtgacaggatataaaagcctgttttatttgatgacatcattaactgagttttctcatctatacattcatacatcgagaaggaactgtcttaaaaaccagtgtttcttttttttttttaagttctagcgtacatgtgcagaatgtgcaggtttgttatataggtatacacgtgccatggtggtttgctgcacccatcaacctgtcatctacattaggtatttctcctaatgctatccctccccagtgatatttgttaatatgcttttttaaaaaagtgtctgccttgaaactggtaattaaaaaatatctcctagggcatttaattatttttcccaataaacaactcatagataaaaaaaaaaaaaaaaaaa

SEQ ID NO: 8155 - DNA, 2464 bp, Homo sapiens
tggccggggagagaagtttgagtaagagataaggaagagaggcccccgagccgcgccgagtctgccgccgccgcagcgcctccgctccgccaactccgccggcttaaattggactcctagatccgcgagggcgcggcgcagccgagcagcggctctttcagcattggcaaccccaggggccaatatttcccacttagccacagctccagcatcctctctgtgggctgttcaccaactgtacaaccaccatttcactgtggacattactccctcttacagatatgggagacatgggagatccaccaaaaaaaaaacgtctgatttccctatgtgttggttgcggcaatcagattcacgatcagtatattctgagggtttctccggatttggaatggcatgcggcatgtttgaaatgtgcggagtgtaatcagtatttggacgagagctgtacatgctttgttagggatgggaaaacctactgtaaaagagattatatcaggttgtacgggatcaaatgcgccaagtgcagcatcggcttcagcaagaacgacttcgtgatgcgtgcccgctccaaggtgtatcacatcgagtgtttccgctgtgtggcctgcagccgccagctcatccctggggacgaatttgcgcttcgggaggacggtctcttctgccgagcagaccacgatgtggtggagagggccagtctaggcgctggcgacccgctcagtcccctgcatccagcgcggccactgcaaatggcagcggagcccatctccgccaggcagccagccctgcggccccacgtccacaagcagccggagaagaccacccgcgtgcggactgtgctgaacgagaagcagctgcacaccttgcggacctgctacgccgcaaacccgcggccagatgcgctcatgaaggagcaactggtagagatgacgggcctcagtccccgtgtgatccgggtctggtttcaaaacaagcggtgcaaggacaagaagcgaagcatcatgatgaagcaactccagcagcagcagcccaatgacaaaactaatatccaggggatgacaggaactcccatggtggctgccagtccagagagacacgacggtggcttacaggctaacccagtggaagtacaaagttaccagccaccttggaaagtactgagcgacttcgccttgcagagtgacatagatcagcctgcttttcagcaactggtcaatttttcagaaggaggaccgggctctaattccactggcagtgaagtagcatcaatgtcctctcaacttccagatacacctaacagcatggtagccagtcctattgaggcatgaggaacattcattctgtattttttttccctgttggagaaagtgggaaattataatgtcgaactctgaaacaaaagtatttaacgacccagtcaatgaaaactgaatcaagaaatgaatgctccatgaaatgcacgaagtctgttttaatgacaaggtgatatggtagcaacactgtgaagacaatcatgggattttactagaattaaacaacaaacaaaacgcaaaacccagtatatgctattcaatgatcttagaagtactgaaaaaaaaagacgtttttaaaacgtagaggatttatattcaaggatctcaaagaaagcattttcatttcactgcacatctagagaaaaacaaaaatagaaaattttctagtccatcctaatctgaatggtgctgtttctatattggtcattgccttgccaaacaggagctccagcaaaagcgcaggaagagagactggcctccttggctgaaagagtcctttcaggaaggtggagctgcattggtttgatatgtttaaagttgactttaacaaggggttaattgaaatcctgggtctcttggcctgtcctgtagctggtttattttttactttgccccctccccactttttttgagatccatcctttatcaagaagtctgaagcgactataaaggtttttgaattcagatttaaaaaccaacttataaagcattgcaacaaggttacctctattttgccacaagcgtctcgggattgtgtttgacttgtgtctgtccaagaacttttcccccaaagatgtgtatagttattggttaaaatgactgttttctctctctatggaaataaaaaggaaaaaaaaaaggaaactttttttgtttgctcttgcattgcaaaaattataaagtaatttattatttattgtcggaagacttgccacttttcatgtcatttgacattttttgtttgctgaagtgaaaaaaaaagataaaggttgtacggtggtctttgaattatatgtctaattctatgtgttttgtctttttcttaaatattatgtgaaatcaaagcgccatatgtagaattatatcttcaggactatttcactaataaacatttggcatagataaataaataaaaaaaaaaaaaaaaa

SEQ ID NO: 8156 - DNA, 1960 bp, Homo sapiens
ggcgctggctggtaagggtcggaattttttcgcatcgagtccgccgcggcgtccagggtcggcagcaaccgcagccgagcccgagcgggtggcggcgccatggcgtgcgcggggctgctcaccgtgtgcctgctccggccgcccgcgccccagccccagccccagaccccgcggcacccccagctcgcgcccgacccggggcccgccggacacacgctcttccaggacgttttccgcagagcagacaagaatgatgatgggaagctctcatttgaggaattccagaattactttgccgatggggttctcagcctgggggagctgcaggaactgttcagcggcattgatgggcatctcaccgacaatttagaaacagaaaaactgtgtgactacttctcagagcacctgggtgtctaccggccggtgctggctgcattggaatcgctgaaccgtgcagtgctcgctgccatggatgccaccaagctggagtacgagagggcctccaaagtggaccagtttgtgacgcgcttcctgctgcgggagacggtgagccagctgcaagcccttcagagctcgctggagggggcgtcagataccctggaggcccaggcccatggctggcggtcagatgcagagagcgtggaggcgcagagcaggctctgcggcagccggcgggcaggacgccgagccctgaggagtgtcagccggtcatccacctggtcccccggctcttctgacacagggcgcagctcagaggccgagatgcagtggcggctccaggtgaaccgcctccaggagctcatcgaccagctcgagtgcaaggccccccggctggaacccctgcgtgaagaggacctggccaaggggcctgacttgcacatcctcatggcccagaggcaggtccaggtggcagaggaaggcctgcaggacttccaccgagccctgcgctgctatgtggacttcacaggggcccagagccattgtctgcatgtgtccgcccagaagatgctggacggtgcctccttcaccctgtatgagttctggcaggatgaggcctcctggagaaggcaccagcagtcgcctggcagcaaggccttccagcgcatcctcatcgaccacctgcgggccccggacaccctcaccattgtgttcttcccagcctcctggtggataatgaataacaactgagccagacctgcacacgccgagggccccgggaccctgcctgcctccctctggagccttctggactggccagcccagcgcaaagaccagggcttgtctcctcctggacttgggcctggtggaagggctctcagcccagggatcagggactgggctgcttgctttctatttattattgatttatttatccctgtaaaaaaaaaaatgtcacttcagcctccaagctactttggcttctgcctggctcaggaaacctgaattctggtccctgctgtccctgcctggctgaacgacccagggcaggtcccgtccctgtctgggtgggcttcaggccatctggccgcctagcgagggtccggctttcttcctgctgtcttgggaccaggcttctgctcctcctcagccagcggcagaagcagggctgatgctcagggaccccccaaccttcaaaccttgcctccgaggctgggcctgagctgggtgccccgttgccctcccaggccactaggttttgactcttccagcacccatggatgtgccagaggcttttgggttggtttgcatgtcatttgcatatcgtttgcatgccctcatcccacccattctcagggcagtatgggaagccccaaggtgacctggccaagtagcaataatttgggtccagggtcacctattgcccccagaggcctctgaaccccagggtgggaccccagcacagaggcaataaaggcagtggtcccttccaaaaaaaaaaaaaaaaaaaaaaaaaaaaaaa

SEQ ID NO: 8157 - DNA, 1942 bp, Homo sapiens
aaccaattgcaccacgaccggatggaagagcccagctgacacaaccaagacgagtctcagtgtctagggaagcttggggttctgctccttttacttcaggcgaacctgaactcagttaatgcaattttgaagcatgccctgaatagattcagtcattatcaagtcaaactaaaaacggtgaaaggttgcgactattaccaaataggaaaaacctgaagacataagaactacacatgaggaatatgtcatttagcactttcactttttgatctccacagaagacaatgagaagtcataccataacaatgacgacaacttcagtcagcagctggccttactcctcccacagaatgcgctttataaccaatcatagcgaccaaccgccacaaaacttctcagcaacaccaaatgttactacctgtcccatggatgaaaaattgctatctactgtgttaaccacatcctactctgttattttcatcgtgggactggttgggaacataatcgccctctatgtatttctgggtattcaccgtaaaagaaattccattcaaatttatctacttaacgtagccattgcagacctcctactcatcttctgcctccctttccgaataatgtatcatattaaccaaaacaagtggacactaggtgtgattctgtgcaaggttgtgggaacactgttttatatgaacatgtacattagcattattttgcttggattcatcagtttggatcgctatataaaaattaatcggtctatacagcaacggaaggcaataacaaccaaacaaagtatttatgtctgttgtatagtatggatgcttgctcttggtggattcctaactatgattattttaacacttaagaaaggagggcataattccacaatgtgtttccattacagagataagcataacgcaaaaggagaagccatttttaacttcattcttgtggtaatgttctggctaattttcttactaataatcctttcatatattaagattgggaagaatctattgaggatttctaaaaggaggtcaaaatttcctaattctggtaaatatgccactacagctcgtaactcctttattgtacttatcatttttactatatgttttgttccctatcatgcctttcgattcatctacatttcttcacagctaaatgtatcatcttgctactggaaagaaattgttcacaaaaccaatgagatcatgctggttctctcatctttcaatagttgcttagatccagtcatgtatttcctgatgtccagtaacattcgcaaaataatgtgccaacttctttttagacgatttcaaggtgaaccaagtaggagtgaaagcacttcagaatttaaaccaggatactccctgcatgatacatctgtggcagtgaaaatacagtctagttctaaaagtacttgaggtaaacatactaaaatgaattatataatgcagcctcttaattctttgaagaactaaaaaattaggaaacaaagttctagcatttacaaaactcagatctcaaagctctgcttgtatttgtgatatttcatttgcttaactgtaaaccatttcaaggtactatcttttaaatctgtatgtaaaatcttttcaaaatacatttttaagctaatactcttaacatagattatgaagttaagtgaaatttatggctctaacagcaaaataattaaagtgccatagtttctcaagtgactaaagtagttattaaaatcaagcacttgatactaatttgaagtgtgtttaaaagtaaatgatttgggaactgacaatgtgtcagaaaatatatgttcatttatcattttaaaatcttgtataatttgccactgtattcatttatgcctaaatctctataacagatgaaaagataattaataaaatcctaattaaaaaatgagaaaaaaaaaaaaaaa

SEQ ID NO: 8158 - DNA, 2610 bp, Homo sapiens
tagcaaatatgtgaaagccagccagactctcaatggcatccaaaaacataaactacatagaaaagacatgaaagccagccaggcttggcttcgaatcccagcactttggaaggctgtggcaggagggttgcttgatctcagaagcttgaaactagcctaggcaacatggtgggccctcatctctactgaaaatcagaaaaattatccgggtttggtggtgtgagcctgtagtcccaggaatcagtggatgaggccctaggatgtcataggcctgagaattccatgctgcagtgagctgtgattgtgccactgtactccagcctgggtgaaagagtgagatcctgtgcagaaacaaaagaagaaaaaaagagatatgaaagcctatatattgaagactaccaagtactgcttagagcagttaaagacctttggaatagaaaatgtttcttcttgcatttcaagattgcttttgttttgggaggacacactattttttaggaatatgaagttcttcttaggcattcctgtaaaaaaggccacttcttgataggattgtattgaatctgtgggttgctttgagttgtatttttatcttaaccatgttacaacttccaacccatggacacaagatgtctgtccattgatttaggtcttcctgaatctcctcgagcaatgttctgtagttgtctgtgtacaagtacggcaccttcttgaacaaatttattctcaggcatattattcttacaagtgctattataaatgaaatcattgtgtcaattttcttctcagattgttcattgctaacacaactgattgtttgctgaaagtttgctgaattcacttattaactctagtagtgtgtgtatgtgagtgtgtgtgtgtgtgtgtgtgtgtgtgtgtgtgtctggcctctgtatgcatgtatgtgtgtttgcatctgtaggtattatttgggattttctatgtataggatcacaacatctgcaaattgagatcattttgttttctgttcaaaaatactttttctcatgtttatttttaaaagataatttggccaggtgtagaattgtaggtgacagtttttctttttttaagttctttattgcaaacttcttgtttgtatgagaaatcttatgccatccttatatttagtgctctgtatgtaacatgttctttccctttttattccttttaggatttcctttttatcactggttttgatggatttgattaaggcgttccttggtgaagttttcttcatgtttcttgttcttagaataatcatatttctgtaatatttgaagtttatggtttccatggagcttctaaatctttcatccagtatgttttaaatatctttgtctctcttctccactacacgcccttcagggattccatttagccctatactggggggtttaaagttttgatgccaatggtctttttatgttttcaagtcatttgttactgtgtgtttcatttatgttagtttcaacttctattccttctagttcaataatcttctcttctgcaatgtttaatccactgccttcttccacttcagactgtaaatcatactttttatctacagaatttgatatttaaaaaatcttcaacctccccatttaattaaaatacaattatactaactgctctaatgtccttttcttctatgtccaacatgtctgtcaatttcaactagattattagattcttcattatgtgtcatgttttcctgcttctttggctgcttcatattcttttatttttttttttttgcggggggatagagttttgctctcattgcccaggctggagtgcaatggtgtgatctcagctcactgcaacctccacctcccaggtacacaagcgattctcctgtctcagcctcccaagtagctcagattacaggcatgcacaatcatgcctggctaatttttttgtatttagtagatatggggtttcaccatgttagtcaggctggtcgtgaactcctgacctcaggtgatccatctggctgcttgatattctaagatttgatgctggaactttggtgtcaatgctcaaaatgcccaaagacaccactcaacctcagtgtctatgcacacccaagcttttgcagcaggacaggtagagcagagatgagtgtgctacaacatgctggtagagggtacccccaattgtgcttggggatttcctattcctcatggaaaaatgtgtcttccttaatttttcccataagaaccaccctacttcatgccctgtctctctgtccaaacaccaggacagtcctctcaccagtctcaaccacccaatggattgacaaaggtgcaaatatgattcagtggagaaggcattctcttgtcaacaaattgtgtagaaacaacttttttttacacaattttttttttatccccaaaggaaaaaaattcacctgaacctcaatactaactcaaaaactaactcaaaatggattatgcaactaaatataaactataaaactagaaaaagtatagcagaaaatataagacaaaatcttcgtgacacagagttaggtaaagtgttctttattatcaataaacacaaaccattaaagaaaacattgataaa

SEQ ID NO: 8159 - DNA, 1440 bp, Homo sapiens
  misc_feature (1225)..(1225): n is a, c, g, or t
  misc_feature (1227)..(1227): n is a, c, g, or t
  misc_feature (1340)..(1340): n is a, c, g, or t
attcgagacaccgtgtcctcttgcctgggagaggggaagcagatctgaggacatctctgtgccaggccagaaaccgcccacctgcagttccttctccgggatggacgtggggcccagctccctgccccaccttgggctgaggctgctgctgctcctgctgctgctgcccctcaggggccaagccaacacaggctgctacgggatcccagggatgcccggcctgcctggggcaccagggaaggatgggtacgacggactgccggggcccaagggggagccaggaatcccagccattcccgggatccgaggacccaaagggcagaagggagaacccggcttacccggccatcctgggaaaaatggccccatgggaccccctgggatgccaggggtgcccggccccatgggcatccctggagagccaggtgaggagggcagatacaagcagaaattccagtcagtgttcacggtcactcggcagacccaccagccccctgcacccaacagcctgatcagattcaacgcggtcctcaccaacccgcagggagattatgacacgagcactggcaagttcacctgcaaagtccccggcctctactactttgtctaccacgcgtcgcatacagccaacctgtgcgtgctgctgtaccgcagcggcgtcaaagtggtcaccttctgtggccacacgtccaaaaccaatcaggtcaactcgggcggtgtgctgctgaggttgcaggtgggcgaggaggtgtggctggctgtcaatgactactacgacatggtgggcatccagggctctgacagcgtcttctccggcttcctgctcttccccgactagggcgggcagatgcgctcgagacccacgggccttccacctccctcagcttcctgcatggacccaccttactggccagtctgcatccttgcctagaccattctcccaccagatgacttctcctccagggagcccaccctgacccacccccactgcaccccctccccatgggttctctccttcctctgaacttctttaggagtcactgcttgtgtggttcctgggacacttaaccaatgccttctggtactgccattctttttttttttttttcaagtattggaaggggtggggagatatataaataaatcatgaaatcaatacataaaaaaaaaaaaaaaaaaaaaaaaaaaaaaaaaggaaaaaagaaaaaaaaaaaacaaaaaaaananaggggggggggcccctcaaaagaatccccccggggggcccaaatgttttgcgggacccccatttttttttggaaaagggggggccctcaaaagggggggcggtaatttaaaancctggggccgggggcccctttttttataacacccccggggggggggggaaaaaccgccaaccttgtggaaattttttgggggggagcaccccttttcttt

SEQ ID NO: 8160 - DNA, 2551 bp, Homo sapiens
  misc_feature (239)..(313): n is a, c, g, or t
  misc_feature (476)..(539): n is a, c, g, or t
  misc_feature (1564)..(1593): n is a, c, g, or t
gatcagtcaggaggccgtgcagtccgagatgggctcgtctcgggcaccctggatggggcgtgtgggtgggcacgggatgttggcactgctgctggctggtctcctcctgccagggaccttggctaagagcattggcaccttctcagacccctgtaaggaccccacgcgtatcacctcccctaacgacccctgcctcactgggaagggtgactccagcggcttcagtagctacagtggcnnnnnnnnnnnnnnnnnnnnnnnnnnnnnnnnnnnnnnnnnnnnnnnnnnnnnnnnnnnnnnnnnnnnnnnnnnnagcattgcccagggtggttctgcaggatcttttaagccaggaacggggtattcccaggtcagctactcctccggatctggctctagtctacaaggtgcatccggttcctcccagctggggagcagcagctctcactcgggaagcagcggctctcactcgggannnnnnnnnnnnnnnnnnnnnnnnnnnnnnnnnnnnnnnnnnnnnnnnnnnnnnnnnnnnnnnnggaatggctctgctctgccaaccaatgacaactcttaccgcggaatactaaacccttcccagcctggacaaagctcttcctcttcccaaacctctggggtatccagcagtggccaaagcgtcagctccaaccagcgtccctgtagttcggacatccccgactctccctgcagtggagggcccatcgtctcgcactctggcccctacatccccagctcccactctgtgtcagggggtcagaggcctgtggtggtggtggtggaccagcacggttctggtgcccctggagtggttcaaggtcccccctgtagcaatggtggccttccaggcaagccctgtcccccaatcacctctgtagacaaatcctatggtggctacgaggtggtgggtggctcctctgacagttatctggttccaggcatgacctacagtaagggtaaaatctatcctgtgggctacttcaccaaagagaaccctgtgaaaggctctccaggggtcccttcctttgcagctgggccccccatctctgagggcaaatacttctccagcaaccccatcatccccagccagtcggcagcttcctcggccattgcgttccagccagtggggactggtggggtccagctctgtggaggcggctccacgggctccaagggaccctgctctccctccagttctcgagtccccagcagttctagcatttccagcagcgccggttcaccctaccatccctgcggcagtgcttcccagagcccctgctccccaccaggcaccggctccttcagcagcagctccagttcccaatcgagtggcaaaatcatccttcagccttgcggcagcaagtccagctcttctggtcacccttgcatgtctgtctcctccttgacactgactgggggccccgatggctctccccatcctgatccctccgctggtgccaagccctgtggctccagcagtgctggaaagatcccctgccgctccatccgggatatcctagcccaagtgaagcctctggggcccaannnnnnnnnnnnnnnnnnnnnnnnnnnnnnaggagagttactcaacagtccataagtcaactgttgtgtgtgtgcatgccttgggcacaaacaagcacatacactatatcccatatgggagaaggccagtgcccaggcatagggttagctcagtttccctccttcccaaaagagtggttctgctttctctactaccctaaggttgcagactctctcttatcaccccttcctccttcctcttctcaaaatggtagattcaaagctcctctcttgattctctcctactgtttaaattcccattccaccacagtgcccctcagccagatcaccaccccttacaattccctctactgtgttgaaatggtccattgagtaacacccccatcaccttctcaactgggaaacccctgaaatgctctcagagcacctctgacgcctgaagaagttataccttcctcttcccctttaccaaataaagcaaagtcaaaccatcatctggaaacagtggccacttttcactgacctctcttcgacatctagtcaacccacccaatatgccactgggtttcgctcccaattccaccccaccctccattacagagctcaccacgccctcctagatcaccgtccccaacacacccattgcctctcaaggcccttatctcagccccttcctgtggccatttccctcagtgcccagatgattccctgggtgagggagacactggggcaccctcagaggttggagcaggctccctgctgtccctggatcctggacagatggctcagtaaactgtgggactaggtgcagacttttgccttcttggagtcctgggtctcctctgagaggtctgggtggtgctcctcctacgcctctagaggtctctgtgttcctcattttccttcaaaagcgggctgtatttctcttctaccttccagctcctcccacagaggaggaagacaataaatatttgttgaactgaaagaa

SEQ ID NO: 8161 - DNA, 1461 bp, Homo sapiens
  misc_feature (1389)..(1400): n is a, c, g, or t
tttttttttttttttttttttttttttttttttttttttttgaattccgaaggatatttattgcaacaatatttatgaaaatgacctgaaattccaacaatagagacaggcttaaataatgcataaaacattcatatcatagaatattttacagctgtttaaaatcatgtttttgtagaataatcaatgatttcagaaaatgtttataaagttcaagatttaaaaagtataatacaaaactgtacatagagcaggattccaaaatttcaaatgcaaatacatataggtacatatatacatataccacaaatacaaaaatgactgaaagaaaaaaatatgaaaatgttaacgcttgttatttctatgcagtgggattatgagaggtttcattttctcgtttaaagtttcctatattttccaattttccctaaattatgtattgctttcacatttagaaaaataataaataaatgttaataataacagtgagatcaaaggagttccaaaagattccaacataaacactgtgtgttttgatcatcctttttttttttttataagtggctaaatcttccagctaaaaagtttttatttccagtagaagtagtacttgtattttttccttgactggatttggatacaggatccattgcaacatatttgatttggaaacctccagctgtcactgaagcatcacttagaaacttcaaggtcatgacatttcctgtactgatgatgtcatctggaagctcatctccacagtatcttcccacaaagccatggacatcatcgtaactgtcatatatttcaacataatcagccaagcaacctgggtcatcttcaaggtcaaaatctaaaaaactcaggtgaatacgctgaccatacttgagtctaatgtgccagtagcagatttggttatcttcgtactcatttgggaagcctggagatttaaaaatttgctttggatctgtaaagacgccaccacactcctttgcgtgtgggttgtagcaataggcatcccatctttcactcctattgagacggattccataatcaataatgccagtttttccaaatccacagttgggccctggcttcacaatggggtatccaactctgcccttagccatccatccagcagcacagacatgaaatccaatttttctggctgcctctagctgcttgtaagttgcgagatggccgccttcaaattcacacaccgccttagcttctgcgtaggtgagcttgtatttgccagaccgtgcttctctgtggtacacaccggctgctcgttcaagccatatggagttatgaaaaattccatccttgaatccccatccttgagtgtcttcccatagcaagagaaataagtaaattaagatgatcatnnnnnnnnnnnnagtgaagtaacagcctgttaggggctgctcacaaattctcagagcagtgcgaattctgact

SEQ ID NO: 8162 - DNA, 2715 bp, Homo sapiens
  misc_feature (269)..(269): n is a, c, g, or t
  misc_feature (468)..(468): n is a, c, g, or t
  misc_feature (1043)..(1045): n is a, c, g, or t
gggggaatgagtgacggggggagagtaacaagcaaggggggtggggagagactaagggaagggagtgcgctgtgagaacacgtaggagcaagaaagagggtggaggagattggggtgtgagtgcgttcgagaaaggggggacagggtaaaaagtgaagatgtgggtgtatgaagcagacggtgaggaacgcaatacggggggtagatacagaggagatagcgcgtaggtgaagtggagaatacgttagtgagatggggggggcgaacgngcgtagtgagtaggtgtgtatgagggtagagatacagacatatgagtagagttggaggatggtggcggacgtatcaggcgaagacacctatcacagattggagatcggggcgggagaatagtatttaggtgaggggtgcgttgtgtgattgctgaggatgtgggggtggagcgaaggatgaaggctgattaaaggtaanagtgggttaggagaggaagagtggcgaatggtgtgtgtataggtagtataagggtagtgcggcggtatatagagataagggggcccgtaacagcgagtagtgagtgaagggagggggatggcgggatagcgaaaatatagtggcggaggcgggggatatatggcgaatacgagggtgcggaaaggatgtcgggggggggaggagggagggggggtgagggaataggggtgggttgtctcaatggaagtaggtagggtggaagagaaaatagagggaggagggatggaatagtgggggataaagaaaggataggaggggggcagaaaaactatgggggggaataaagtgagggagatatgaggggcgagcggggggaataggggggtataggaagagtatggtagaggcggggaaaggggacagaaagggggtggggggggactaagaggaggttgcccaatgtagggggagggggggaaagatcggggcgaaagcggaagtgttatagaggcaggggaggttcgtgaacgttggacagggtgtcgagtttttggtgggggtgtggggggaggtgnnngtcaaaaaaaaaaaaaagaaagaaagaaaagaaaacacaggaaaaggaactcacctcttttatcatcttagtatttagtactaatggtttagagcaggaattgacaaactgtggcctggactcatggaccaactctggcccaccacctgtttctcagaagaaaattttattggaactcagccacacttactcatttacatgttgtccttgactgcctttgtgtccagtgtcagaactgagtagctgcagcggaggttgtgcctctgggctttaatatcacaaacagagcagcttataagcaacagaaacttacttctcacagttttggaggctgggaagtccaagatcaaggtgtcaacatatttagggtctagggaaggtctgcttcttggttaatagaaagcacctttcactgtgtcttcacatggtagaaggggagagctctggtatcttcagccccttataagggcactaatcccattcatgagagctccaccctcacgacctaatcacctccaaaaggccccatttcgtaataccgtcagttaagtttcattatatgactttgatggggatatagcccatagtaggttgtatgtccctgaaagcctaaaatatttactgtttggctctttacagaaaatattttcttggcccctgttccagagcattcatcaagtcagataaagggtttaaaccagtcagagaaactaggtggaatggaaaagtactgagagataattggggacagaaaaataaaagagatgggaaatgctgcatcaaaatactcctacctctaggatgttactatatattgttaggagaattcaagttattgaaacttgccaaattcttgagtgaagaggaattcatttgagagccaaaatttgactaaggaaagaagaccaacatgggctttccaaagttgagtttgaattctgccatccccactaagcagtcatgtgaccttggaaaaactccctactctgagtctcagtttctttatctgtattaggtttcaacaaagggaataaatcattggcttctcatgaggttgtcataaggattaaataagacaatgcatataaaagaactggcagacaataaatatagagtcccccactcctgcttggtgctctctttctctctccttctctacatagagaagtgccagagcatccgtcagtagaagttacttaaggttggctgtgtcttccacatcttttgtttacccatgaagaactgtgaccatcttgttctgtgtcttgtcataaagatgggacgtgacttctttctgctcttgcttccatctggtgctgttttctgcacagcctccttgagaccttccagaaccttcttttttcctacttcgtatcacttaaccagtagctatctgggatggttccagaggctgaagtttgcagttgaataacattttaaatagtgttaagcgacttgggatctctggccctttgcgtttcagtatttgtcctttttatgcctgatgtttaacctgccacatgtttgtactgcaacatgaatcttggaaattttaatgttatgcatttcaaatgtttttggttatctgtaaactaaatgtgcccttattggctcacttgtcaataaagatgtttgtatatgtattgtcagaaaaaaaaaaaaaaaaaaaa

SEQ ID NO: 8163 - DNA, 3862 bp, Homo sapiens
  misc_feature (657)..(671): n is a, c, g, or t
  misc_feature (810)..(838): n is a, c, g, or t
cacaggtcccagtcagccagtggcgagccaggactctcggggttcagcagggggtagtggacagcccaagctgcttctcttagaatggctgtggcttcacaagtgatgagaagagcatgcgcttgatttcagatccccattacaagctcataatgaatgagtcacaggagaaaggtgagacttgggccctttcgtgcctgatgggaagctcttgccacccaggggagcccctccagactgtccttgcccacctggctgcactggcctctgtatgccaaaccagtggggacaggttctgagggacctggacagattctgctgcctctagccgtggctggatgatgttatgcagccaagcacagcacgtgctgctctcaggaagcccaggggctgtggtcattgcagtggtgatggtgggcacagggtgctccccagacctccctcctccaagtagagctgaaatgggaaggaacccctgggacagcccctgccctgctagatctttgcctcagattgctgctgtggccaggcccaggatctccagccctatggctctgagtcctgacatgctgggggcccaggggctctggacacactccatccagggatcccttcctgccatctgggcagcaaccatggggacaaagggaggaagcnnnnnnnnnnnnnnntgccacttgtccaaggcacttccccatcctgacagcggcccccacccagcccaggattctgggttgtggtctcgagctcacttcccgttatctttggggctggggctgacatcaggaggacatctgactggtggatggnnnnnnnnnnnnnnnnnnnnnnnnnnnnnagtgcctagggctctcccttcccagagagacatggagaatggggttgagggagggcccttccctagccgctgtggcaactccagtgagctgttctgggcaaagtgtggcccaagtcggcagccccagccctgcagtgctggggacgctgacaggacacgggaagaggccatgctctccctcgggacctgctgttccatgtgtcccaagccctcctgctttccagatggcccctcaggaaaccacctttccagggcctctgctcccttgggcgctcgctgggtctgcatcaacggagtgtgggtagagccgggaggacccagccctgccaggctgaaggagggctcctcacggacacacaggccaggaggcaagcatgggcgtcttgcgggcggtagcgccgacactgtgcgctctcctgcagacagcctctccacgtcaagcttccagtctgtcaagtccatctctaattcaggtgagcaggctggcgtccatgtgctcacaggggtgagtgccccacggggaccccagcctgggtggcctctaggggtgctgaccaggtaccctctgctgggccaagctccaggatttggggatgaaggtgcagctgaaaagagccctgcaagctgaagccaccgggaggggattaagggggggtgggcaggaccagggaccagtcacagggcagtaaggcctcacagcaggcaccccagggtggggcagcaagcaggcaggaggggcctccccgggtggccgcctagggaggacgtaccctggctgcccagcagcagccctgcttggccgtgtccctgccacaagcaggcaggacacaggagggatggcactgcccacggagccctgggctcatggcaccttctgcagagtgagccgggagcagagagcctcttttccccactctgtgaggccgggcattttcctcagccctgccctaacccccaccattcctgtgatgggcccaggtgctggacgggccttgtccttgccgaggaaacccatgcaggctgggtcccaagcctctcatgcagtttcattttacccaagatggggccagcttccactatgttgattgttctagagtgttcacaggcaccacccatgggcttcaccctcagaaccacattgattccccccagaaccctccaaggcaggcttccctttacagaggaggaaactgaggcagggacaggggcttcttgggtacacacagctgttcctggaaaacttgggcggtgactgttggtgcctgcagtgaccggccttgtagggtctgacttgcagccaactctcaaggcaaggccaggccccagcccggctccttcaacaagcaagattcaaaagctgacgtcccccagaaggcggacctggaagaggagcccctacttcacaacagcaagctggacaaggttcctggggtacaagggcaggccaggtaaggcttgggtgttcctggggtgcaagggcaggccaggtaagtcttgcctgcaccctaagggccccatgactacatttactaggctcacgccctgcagtcagccaactgctctgcccctagctccaggggcctgtctccagggctcatgatagcagatgacggccacgctctacccatcggtgggcgctgtcttcctcccttcccctgggggtcctgcagagtacctgtgctgacctgagcccacgaggggggccagtagcggcccctaaaccacttcctcagagaaaagtaaagtaatattctgaccaagagaaggcttgctgcccctggccacagcctgcctttggagggcactaggccagcaggtcagagtaggaacaggttctggtgatccctgagtttgcgggactgccctgagatgctacagagcgcacactttcagcagcgcaaccagcaggacaggctcctgcatctgcacatcccgagaccaggcctggagcaagatgccccactgggtgtggggtcacgaccaagagcagcctggcagctagctggtcacccactgaagcccatctgacccttagggcaccttcagaggggagaaagggacaggccccagtcccagagacccccacctggtgcccagagcaccctgctcagtgggagaggggaaccaggccctcttccccacattggcctgggcgctgcctggggaggtatgctgggtgggtggttagacgcacctgggcaggtcacctctggctgctgcaatgactgtttcagaaaggagaaagcagaggcctctaacgcaggagctgcctgtatggggaacagccagcaccagggcaggcagatgggggcggcggcacaccccccaatgatcctgccccttcccctgcgaaagcccaccacacttaggcagtgcgaagtgctcatccgcgagctgtggaataccaacctcctgcagacccaagagctgcagcacctcaagtccctcctggaagggagccagaggccccaggcagtcccggaggaagctagctttcccagggaccaagaagccacgcatttccccaaggtctccaccaagagcctctccaagaaatgcctgcttctgagcccacctgtggcggagcgtgccatcctgcccgcactgaagcagaccccgaagaacaactttgccgagaggcagaagaggctgcaggcaatgcagaaacggcgcctgcatcgctcggtgctttgagctacccgaatctggtcagtgccaggcccaccaacctgcagctggagattggctctctatagcatttcctgatacttccgctacttttaggcctggctaaattccaagacagataacactcaagatagataaagtacttgatctccaaactgacaaactgtttattttctagctgttattttgctatttggcatttacataaaagcacacgatgaagcaggtatcgccttacctgttgaaactgaaaataaagcttgtttatttccaaaaaaaaaaaaaaaaaaaaaaaaaaaaaaaaaaaaaaaaaaaaaaaaaaaaaaaaaaaaaaag

SEQ ID NO: 8164 - DNA, 1475 bp, Homo sapiens
ctgggtggcgattcggacgaggagcaattctcctgcctcagcctcctgagtagctgggatcacaggcgtacaccaccacacccagctaagtttttgtacttttagtagagacggggtttcaccatgttggccaggctggtcacggactcctgacctcagatgatctgcccgcctgagcctccgaaagtgctgggattacaggcgtgagccactgcgcccggcatggagctgctattgatgggtgagctccacagcttttgcagaagcagaggatatgacttgagagcagtgctgtcacctctcagcatgtccccaagcccaactggggcctcctggagatgcctcagtcggcactggccccaagggaatcgtggggaacagttgcacaatttgcaagtttctgagtgcagcttttcccatccttgggatcagcagataagttgtaaacacagggaggtactgcttattggatatacttttcataagtaggacagaattcttttgggactctagagttgggaactaccacttactagcggcgtggctgaggcagtcttcctcctctgtggctcaggcccttcatctgtgaaatggggtcacagcatctgcctctcagggtcactgtgaggtgtcgatgtgagcaaggcctgaggcttggcaagaagtcaatgtctgcaactcagcagggagcaatggcaggggcagtcaggggtcggctcggataggggtgggtgggctcctgaggttggaagggtaggaattacagagctcttgttactattgttgttactgtttttaaagatacgatatttcagataattcaggagcacgtaaggatgaaacttaggataacctaaaatcacacaacctagagagaagcgcatttttgtcttcccccattttctaggcaaaaatgaaagtactttgtcctcttgaaaaacaattctctaatgaatatcctatgttacatagaggcctgtgtaatgcatttgtgtggccacatggtgtcaatttcatgaatatacaataatattattaattccctgctgaggacattaactggtttccaaggctgcttgttgtttttgctactacaaataatgcattgatgataaatacttttacatacatggttgtatgtttatctgaactattttcaccaatatattcacctagtgtgtatggaagtgtccatttttgtcatacccctggtaaccctgtgatattatttttaaacattttgctaatggatctctgttcttgtttgaatgtatttaatttccagcagaatgagccccattccttattttgattggccatttatcatgtacatatggtgaaatgcctattcgtgacttagccaatgttgtttctttttcttactgattactacagtacatttttatatgaaagcaaaaaaaaaaaaaaaaaattagtttttcggccctgtgttagaaacaactaagctcgtcata

SEQ ID NO: 8165 - DNA, 1599 bp, Homo sapiens
agcgcacattaaccggcaggatgtcggaggtgcggctgccaccgctacgcgccctggacgactttgttctggggtcggcgcgtctggcggctccggatccatgcgacccgcagcgatggtgccaccgcgtcatcaacaacctcctctactaccaaaccaactaccttctctgcttcggcatcggcctcgctctcgccgggtacgtgcggccacttcatacgctcctgagcgcgctggtagtggcggtggccctcggcgtgctggtgtgggcagctgagacccgcgcagctgtgcgccgctgccgccgcagccaccctgcagcctgcctggccgcagtgcttgccgtcggcctcctggtgctctgggtcgcgggcggcgcttgcaccttcctgttcagcatcgccgggccggtgcttctgatcctggtgcacgcctcgttgcgcctgcgcaaccttaagaacaagattgagaacaagatcgagagcattggtctcaagcggacgccaatgggcctgctactagaggcactgggacaagagcaggaggctggatcctaggcccctgggatctgtacccaggacctggagaataccaccccacccccagcccataattgggacccagagccctttcccagcacttaaaacaggagcctagagccccctgcccaaacaaaacaggacatctgtgaccgccctacccccacgccagccccaaactaagatatccctcacacccagcccccattacctagggacaagagtcttccccagccttgaacctaggaccaagagccacctacatccagccccaaaactggggcttcaggccagagcatccatggccaatttcaaattgtgaacccagagacactcccatccacccttctccatgctcatccccaaactggggcctggagcaaggcactctcaaatcttgaaccctggaccaaagcttttccagaccccaccctaccttccaacccaggtcaagacattgccaaatcttgaactcagaacccaagtgttccatgcccctgtgtggatggagtcgggtatcctgactgttggacccctggtccaggtgatcccgaccctcaccagtcccatttgcctccctccagctctgcttaggcattttgcccctcaccccaatgttccacaccatcgacaaccaaggggtgaggtggggacaggcctcagcagggaatggggcgtatatgttagtgttgctgcaacaataaagcctgttgcatctctcatgccaaaaaaaaaaaaaaaaaaacacaaacacacccccccacacaaccacgccaccacccacacacacccaccccacccccccaccccgcccccccgccacccaccccacacgctgcgcccacacagcaacccgccggagcccacccccccacccccacccagccccacaacaccgcccaccccccccgccgcaccacaccccccgccaaccactccggggtcgcgcggcaacccaccgcgacgcaaccgcgacaccccgacaaaaccccggggacacacctccgaccacggcaacccctctcgcgccaacagcccgcacaaataccctcacacacca

SEQ ID NO: 8166 - DNA, 4600 bp, Homo sapiens
  misc_feature (2570)..(2584): n is a, c, g, or t
  misc_feature (2703)..(2728): n is a, c, g, or t
attgattaaaaggtgacctttcttattggactgataagacaaaaatatagattccaaatctattgacatatgatatcacatccacaaatgtttgcctatttttgtagcattattttggttgcaaagtctcttagggaatgcacaaaaataatacaaccttaaaaatcagactagaagatggaatataagtggtttccttgtaatttttttttaagcttggagaggtaataacacatctttgaattcaaactgaggactgctgcttaatggtgcttttacagggtggttctaaaatttttgagagtcaggtattgctttctctgactgtttaattcaccactggcacgtgtttcctatcctcaagcataagtttaaaagattacaaacctcatgctgctcagttttttctttccagtaaatcagatgcatggtttctctaaatttacatatagaaaatcgagatgtggtgggtattagactaacacttcagtgataggaagaagagactgatttctcatatttgtgtaaaacattctcttacctaactaccatctggtccacattaatttcctctcatagccatagctttccattaccaatgagttttccatgtattcacagcatatgggccaggaaatctttctacagagaatgtgtcccttaggcatatatttcccctagattaccgtattaagaaatgttctccctaaaccatacttatggcattaccataaaattgcctcttgaacacagttaaattgaaagtgctcaaaatgcatatcaattcaggtaaaagaaatcttgctacttggaggggaggtattttttattcttccccactttctctttctaactccctacaaagctatttctaattatttgcttatgctgggcactgaattttctcttaggctgaccatatattttattaaagtagtcttgaattcaggagtggaaaaaaaaaagttatgttttagacctcaatgtaagctgaaaggaaataaaggaacttctatatttccatttctcaggctgattttccttcccctgttctcttatctgtatcatgacatgagacgtgaacctcagaaatgtaaaaacaaaaagtcctagaataaagcattcccttgaattttaaatgaacatgcttttagcagcctggatacgaagcagactattttcaacaaattgaatgtttccccacttgtgtgagagccaaacaagtgccatacagaaagggacctcttcaatgttaccaaagctttgtggcagcatttaagtgtggtggctccatagaagtcactatagcatggacgagccacttggcttgctttttcctgctaatcaaagttttaagaagataaaaagctatctttgttatatatgttttgtctaatttgcaatattacagtctcctggggggaaatccaacttccaataataattgtaaaaaaaaaaaaagaatgcactgtacttattcttttaatctgtctttctagaggccaatattttatttatcatgtgcatggtgatcatacttcaaggctggagcttttggagttgttgtgagtctgccctactttccaccaaaggcaccaattatacatgcacagtagttgcccttgtatcttttaaaaattgttcaagaggttgttctgtgtaagccaataactccacttgaaaatcacgaggaggtcatattttatttctgccagagagaacaggtatcattgtgccagcttggatcaaagcacctgatacaatctgtatttaaccttgtggaatgatggagggagagcttacgaacgaattcacaggaaatggctagagtttctgctgtaactctcaacctagccattcttctcatattatcctatggtagcttatctgaacctcagaaatctatccttttctaatttgaatcattttagtcaacgcagcctcagaaacggaaaccatctattgaaataatacacaaaagggacagccgtaatagcgtgtagccgttgaagcctccattccaatgaaaagacagtgggaatagatccctttggaaaccactaactaatcccagaaagaggaatgcctgtgaagttgagttgaacctgaagactagacacactgtagaacctccataggaagggtgcagagtaactgagttacttgtgatagggacaagacttacccactaccagaaacctgccccatcggtcacaaatgggattcccagagtggacactttctgtgtttagtgctgccatgggaatatcaaagaaggacactggcctttcttgagcacctatgtgtcagacactgtgcaagatgctttcaccattatgtcactatcctcccaacaccgagaggtatctttatccccactgggtgcacaggaagaggttaagtgattccctgaggcccacccagcaagtatgagagataggatctggcccttcattttctaactacaagttcaatgggctttctgctgaacacaccccacaccaccaccaccaccaccaccaccaccaccactaagccgtgtcatttctagggccatctcctctcagtcnnnnnnnnnnnnnnngtgtcccacctccaggcctctgcgcaaagggaatgtgggtctctctggtgatgttttcctaactgtatttgtgatgaaaacagggcattccagttccctcttgcccagcacaaccacannnnnnnnnnnnnnnnnnnnnnnnnntatgagtctaggggaggaatgctggactggaagcatctgcttgactcacctgacagcacagaccctttgggggcagtgtcttcccataatcaccaagacaagaagggagtgattcgggaaagttacctcaaaggccacgaccagctggttcccgtcaccctcttggccattgcagtcatcctggctttcgtcatgggggccgtcttctcgggcatcaccgtctactgcgtctgtgatcatcggcgcaaagacgtggctgtggtgcagcgcaaggagaaggagctcacccactcgcgccggggctccatgagcagcgtcaccaagctcagcggcctctttggggacactcaatccaaagacccaaagccggaggccatcctcacgccactcatgcacaacggcaagctcgccactcccggcaacacggccaagatgctcattaaagcagaccagcaccacctggacctgacggccctccccaccccagagtcaaccccaacgctgcagcagaagcggaagcccagccgcggcagccgcgagtgggagaggaaccagaacctcatcaatgcctgcacaaaggacatgccccccatgggctcccctgtgattcccacggacctgcccctgcgggcctcccccagccacatccccagcgtggtggtcctgcccatcacgcagcagggctaccagcatgagtacgtggaccagcccaaaatgagcgaggtggcccagatggcgctggaggaccaggccgccacactggagtataagaccatcaaggaacatctcagcagcaagagtcccaaccatggggtgaaccttgtggagaacctggacagcctgccccccaaagttccacagcgggaggcctccctgggtcccccgggagcctccctgtctcagaccggtctaagcaagcggctggaaatgcaccactcctcttcctacggggttgactataagaggagctaccccacgaactcgctcacgagaagccaccaggccaccactctcaaaagaaacaacactaactcctccaattcctctcacctctccagaaaccagagctttggcaggggagacaacccgccgcccgccccgcagagggtggactccatccaggtgcacagctcccagccatctggccaggccgtgactgtctcgaggcagcccagcctcaacgcctacaactcactgacaaggtcggggctgaagcgtacgccctcgctaaagccggacgtaccccccaaaccatcctttgctcccctttccacatccatgaagcccaatgatgcgtgtacataatcccagggggagggggtcaggtgtcgaaccagcaggcaaggcgaggtgcccgctcagctcagcaaggttctcaactgcctcgagtacccaccagaccaagaaggcctgcggcagagccgaggacgctgggtcctcctctctgggacacaggggtactcacgaaaactgggccgcgtggtttggtgaaggtttgcaacggcggggactcaccttcattctcttccttcactttcccccacaccctacaacaggtcggacccacaaaagacttcagttatcatcacaaacatgagccaaaagcacatacctaccccatcccccacccccacacacacacacacatgcacacaacacatacacacacacgcacagaggtgaacagaaactgaaacattttgtccacaacttcacgggacgtggccagactgggtttgcgctccaacctgcaaaacacaaatacattttttaaaatcgattaaggcaaaaaaacgggcgcgggggaaggagcggagccgctgaaagagggcaggagaagggagagagcaaacacgccagcgcaacgcccgg

SEQ ID NO: 8167 - DNA, 1084 bp, Homo sapiens
  misc_feature (33)..(33): n is a, c, g, or t
gggggggggtcgtacacaacttcttttttttgnttagaaaaatttgttttgcccaaggggaaaaatgggggggagaccctcttttgggggccccattagtttgcaaacacctttttcccttcagaaacccaattccccccccgcccaagagtggtttaagggtttgagagattcccgcggggaagaagttctttttgccccccgaaaacaggggagttgggggcccccgcagaaatggcctcaagggggattttgctcccaggtggggccaggggtgtggatgacgctgtccgacgaaggcggccacgggcggacgcccagcacacgaagtcacgtgcaagggcctttgattcgttccttttttttaaagacgacagtttttgttgttagccctgaattattgaaaatgtcacccagattttagaaactgcggtcatccagtttttcctgacaccggatgggtgcttgggaaccgtttgagccttatagatcatttccattcaatttttttaactcagcaagtgagaacttacaagagggtttttttttaatttttttttctcttaatgaacacattttctaaatgaattttttttgtagttactgtatatgtaccaagaaagatataacgttagggttgggttgtttttgtttttgtattttttttcttttgaaagggtttgttaatttttctaattttaccaaagtttgcagcctatacctcaataaaacagggatattttaaatcacatacctgcagacaaactggagcaatgttatttttaaagggtttttttcacctccttattcttagattattaatgtattagggaagaatgagacaattttgtgtaggctttttctaaagtccagtactttgtccagattttagattctcagaataaatgtttttcacagataaaaaaaaaaaaaaaaaaaaaaaaaaaaaaaaaaaaaaaaaaaaaaaaaaacaaaaaaaaaaaaaaaaaacacaacaacgacacagaaaaaaagagaggaaaaaaaaaaaagacagacacaaggaacgagagaggacacacgacaagaagcaacgaagaaaagt

SEQ ID NO: 8168 - DNA, 4160 bp, Homo sapiens
  misc_feature (1392)..(1413): n is a, c, g, or t
  misc_feature (1425)..(1440): n is a, c, g, or t
gggggcccgctgcagggagaacggactccgggcggagggcagccaatccgtttcagcgcaggtcttgctcgggttgggcttgccactgcctggaacatacctgtccccctggcgcaacactcagctggctgcgaccgcaaccccgagcctggacactgcgccaggaatcctaaaaccaaaatattagaacgaaaacagaaacatggctcactatattacatttctctgcatggttttggtgctgcttcttcagaattctgtgttagctgaagatggggaagtaagatcaagttgtcgtactgctccgacagatttagttttcatcttagatggctcttatagtgttggcccagaaaactttgaaatagtgaaaaagtggcttgtcaatatcacaaaaaactttgacatagggccgaagtttattcaagttggagtggttcaatatagtgactaccctgtgctggagattcctctcggaagctatgattcaggagaacatttgacggcagcagtggaatccatactctacttaggaggaaacacaaagacagggaaggccatccagtttgcgctcgattacctttttgccaagtcctcacgatttctgactaagatagcagtggtacttacggatggcaagtcccaagatgacgtcaaggatgcagctcaagcagcaagagatagtaagataacattatttgctattggtgttggttcagaaacagaagatgccgaacttagagctattgccaacaagccttcgtctacttatgtgttttatgtggaagactatattgcaatatccaaaataagggaagtgatgaagcagaaactttgtgaagaatctgtctgtccaacacgaattccagtggcagctcgtgatgaaaggggatttgatattcttttgggtttagatgtaaataaaaaggttaagaaaagaatacagctttcaccaaaaaagataaaaggatatgaagtaacatcaaaagttgatttatcagaactcacaagcaatgttttcccagaaggtcttcctccatcatatgtatttgtgtctactcaaagatttaaagtcaagaaaatttgggatttatggagaatattaactattgatggaaggccacaaatagcagttaccttaaatggtgtggacaaaatcttattatttacaacaaccagcgtaattaatggctcacaagtggttacctttgctaaccctcaagttaagacgttgtttgatgaaggctggcaccaaattcgtctcttagtaacagaacaagatgtgactttgtatattgatgaccaacaaattgaaaacaagcccttacatccagttttagggatcttgatcaatgggcaaacccaaattggaaaatattctggaaaagaagnnnnnnnnnnnnnnnnnnnnnnaaagttgcgaannnnnnnnnnnnnnnnacagaacaaccgggagacagcatgtgagattcctggatttaatggagagtgccttaatggtcccagtgatgtaggttcaactccagctccctgtatttgtcctccgggaaaaccaggacttcaaggccccaaaggtgaccctggactgcctgggaaccctggctaccctggacaacctggtcaagatggtaagcctggatatcagggaattgcagggacaccaggtgttccaggatctccaggaatacaaggagctcgaggactaccaggttacaaaggagaaccagggcgagatggtgacaagggtgatcgtggacttcctggttttcctgggcttcatggcatgccaggatcaaagggtgaaatgggtgccaaaggagacaaaggatcacctggattttatggcaaaaagggtgcaaaaggtgaaaaggggaatgctggcttccctggcctccctggacctgctggagaaccaggaagacatggaaaggatggattaatgggtagtcccggtttcaagggagaagcaggatcccctggtgctccggggcaggatggaacacggggagagcctggaatcccaggatttcctggaaaccgaggattaatgggccaaaagggagaaattgggcctccaggacagcaaggaaaaaaaggagccccagggatgcctggtttaatgggaagcaatggctcaccaggccagcctggaacaccgggatctaagggaagcaaaggtgaacctggaattcaagggatgcctggggcttcagggctcaagggagaaccaggagcaacgggttccccaggagaaccaggatacatgggtttacccgggattcaaggaaaaaagggggacaaaggaaatcaaggtgaaaaaggtattcagggtcaaaagggagaaaatggaagacagggaattccagggcaacagggaattcaaggccatcatggtgcaaaaggagagagaggtgaaaagggagaacctggtgtccgaggtgccattggatcaaaaggagaatctggggtggatggcttgatggggcccgcaggtcctaaggggcaacctggggatccaggtcctcagggacccccaggtttggatgggaagcccggaagagagttttcagaacaatttattcgacaagtttgcacagatgtaataagagcccagctaccagtcttacttcagagtggaagaattagaaattgtgatcattgcctgtcccaacatggctccccgggtattcctgggccacctggtccgataggcccagagggtcccagaggattacctggtttgccaggaagagatggtgttcctggattagtgggtgtccctggacgtccaggtgtcagaggattaaaaggcctaccaggaagaaatggggaaaaagggagccaagggtttgggtatcctggagaacaaggtcctcctggtcccccaggtccagagggccctcctggaataagcaaagaaggtcctccaggagacccaggtctccctggcaaagatggagaccatggaaaacctggaatccaagggcaaccaggccccccaggcatctgcgacccatcactatgttttagtgtaattgccagaagagatccgttcagaaaaggaccaaactattagtgtctgatgcctcattcagcagcctaggcatggtgctttttctgtggtcttttgcatctcaggaagataaccaacagtatcccttgaaaagaaacttaagtacctcggtgtttttattttttttttcttatggaaaaaaatataaaagatcacatatactgattttaaaggctcctcagtcatttggagcccttggattagcagcattaattaaatctcaagggtttcttgtaaagtccatttatgttaatcaaagttgaatataaaaatccaccattgcctgttagccagtcagttttagtcactgtgaaatatttcacattcagcctccatgcagtagagatttgagtttaatttcatgtccatgtgactttcatgtttcctatctcatagctcatgctactacataagccaaaacatgtatctcatcattggaagtaagatcagggctgatattcacctgggatagacagtattggtgaactactcatttactacagtgtctcagccttgataaagggcagtggattgcctgttgttcggtgttgtgaatagcacctctgaataagattagagtgtttcttaattcatttcaaactctaaaattagattaatggtggtgctaagaaagagtattaattactttgggaatggtcaaaattaacattaaaaacattttagacaaaaagtttcattgtacattcaaagaaaatgtaagtttggaagtactaaaagactattttatacttgttgattaatcggaatgtttgttgtatgccttcattttccatttcacttatatgtgcatgtccatatatgttaattttcattgtagcaaagctaatggaaataaagctaatgctctagttgaaagaaaaggaaaactcctgaaatcctagaatgtcttgttatttttagctgactgtaaaatattatgaacagtctttgtgtattgtgcttaatgcttttgtaagaaacagaatttgaaatatttcatccttgtcatgctcaaaattttgttacatgcttgttattcagagtataataaagttttgtacaggcctgaaaaaaaaaaaaaaaaaaa

SEQ ID NO: 8169 - DNA, 362 bp, Homo sapiens
  misc_feature (354)..(354): n is a, c, g, or t
gctgctgcctgcaggtaaaattaaaagggtaaattttaccttccccttggtggtggtgctcaagagcgctgaacggatgggttacaccgggctcaatatcacctatccctgcaagcaggccatcctccccttgctcgatgagctttctgacgaggcgcgcggtattggcgcggtcaacacggtggtgttcagggagggcaagcgcatcggccacaacaccgattgccttgggtttgccgaggggtttcgccgtggtcttgcccaggccgcacgtcaccgtgtgatacagatgggggctggcggcgccggtgcggcggtggcacatgcgttgctgtccgaaggccaccaaggggnagagaact

SEQ ID NO: 8170 - DNA, 2565 bp, Homo sapiens
gagagcaagacggcagcatctacggttctttctgctcaggaatgggaacccagagtgggcagtagagcggaggcaagccatgcagaggcaggagcagatgagaccctagatgccacgagaagctaaacatgtggggaaaataaagagcagattaactcaggaaaattatatggggagctcttatgctactctgaagatctgagactcgttggagaatttacaatcccaaattaactcagggagaattccaactagactctgaaatgaattagatggagatttaaaatagggcaatttagtgggaagagatacttaatttgaagacagaatcatgaataaactggaggataagcaggaccagatgataccatgaagagaagtttacaggccctctattgccaactgttaactgtcctgctgacggtgtgctgcatgaagaggaagaagaagaccgccaacccggagaacaacctgagctactggaacaacaccatcaccatggactacttcaacaggcatgctgtggagctgcccagggagatccagtcccttgaaacctctgaggaccagctctcagagccccgctccccagccaatggcgactatagagacactgggatggtccttgttaaccccttctgtcaagaaacactgtttgtgggaaacgatcaagtatctgagatctaactacagcaggcatcactttgccattccgtatttttcgtctctaaattataaatatacaaatatatatattataaatataacctttgtgtaaccctgacttaatgagaaacattttcagctttttttcctatgaattgtcaacatcttttttacaagtgtggtttaaaaaaaaaaaaactttacagaatgatctgtggctttataaaataaaggtatttctaagcaaagcagttgcattgattgcttctcttaataactattcttgagcacctggggatcccaggaaccctggtcaggtgaggtaagagactgacctcctgtagaagctgaatgttacagtggtcaagcgcacgattctttgagtgattcttaaagctctggttcctcttgatttggtgtgaccccatttcctcccttctcatacgcacacctgtaaagggaactggaccgcctcaggggaagacggcagactcatgcacagagaaggaaaagggaacatctcatcacctctgaggatgagtaccctggagccttatgacggcaccattggatgtcatgtttaattccatccaagttgtggatggcaggcaggagcatggagccctcaggaatccatggaggacatcaaggcatcccaaggccatattcccctaacattacttccactgctaacaacaggactgcctttccctggtgggaaaatgctccctttatgcccattcctgtatcccctccaacacccacatctgcattaaacacccgtgcctttctcttggagagggtttagatgcagatcccggccctggagctttaaaatgcttgcccttccttcttcaaggatcaaatgtttattggggttcagctttgttttctcaaaaggccatggtatcgtgcccctgaggaacatgtttatctaagaagctttgaggtagtagagcgataatttttgaaaccttcctcctgcaatctttaaaaaagaaaaaaaagattgcccaaacaaatcatttgggagaagacatcattatactcctacttggcactgcaaacctgctcgcagcaccagccggtggacttgccatccagctctcagcttccactgctccccttgttcccggccggctggctgcctccccgtgctgtgtccagcacggccaacaacgtcagaccctcagagacgcccaaggggcttccagaggtggccgcttctctattttttcctgattgtggctgagagagatgattactgctttgacacttcctttctctaaaagaaaaatagtttgatagtatattttgaatatagatgctcttatagtcagattgggaattgaacttgaatattgggtcatatgtttgtgttgttgctgtagtctatcatgacttttttctttctgcattttccttaaaaaaaaaaaaaagatggccttcaaaagtgtgttctcaatgttgtatgaacctccttcacatgagttcggttgttgtctctcttcaaagactcttcaacccacaaagaagcaactaaatgtttctctaagtttaattttctagcgtgttgttgtcttacctttttaaccttaccataatatttctgttaactgttacatttaatataccaatgtgtgtaagtatacagagaaaaatctgtttgtaaagtaaaatttatatataatatatgtaatcaaagatacatatgttatatatacatatgtggatgtatgacttatttttccttatccacagatttcagctaccatgtatatataaataaacttattttattagccagaggattctgttgctaatacattttgcattcttttcaagataagctctaagtcttccttaagcagtaccaacaccactttatatccatctgta

SEQ ID NO: 8171 - DNA, 614 bp, Homo sapiens
acgaagcgactggcaccagctgagtgcggcgactccaagctggtgcagctaggggtcagtcggtctagcatacgactgcagcagcggcgacggaaccagccccgctccgagtgccacgtctccaggaaccccctccttactcttggacaacactccgcccccgcccgggcctccgtcccccaaaccgccctcatttgtgcagctgcagatccttcggacacatccctaggtgtctccatcctcattcggtccatccaactcccagacctcacgtcaaccggctgcaccccactttccagcctgcgccccagatctgcagccttcgcccctagatacacccgcctggtgatgaggcgctcctcgcgttccttccgtctccagtgcaccggctttccctcgtcctctgcgcagtccatctcagctcatctctccaattcaatgccatcatctctcctcaccatctctcggtgccctggaatgtttgctgtcagatgtcccctgtgaaacccacaaacgcttgcgatttggcctccttgttttattttgtgtagtcctacaacgtcttgttactaccccctattacaacacttataactcaaaaaaaaaaaaaaaaa

SEQ ID NO: 8172 - DNA, 3394 bp, Homo sapiens
acaactatcaacagccgggaaggctgagcgcgtgtgagcgccgaggggggcgcaggaccctcgcaacttcttcgcaggactccagcctggccgccggcgcccgcagccgtccgagagccctgcgcccgcgcctccccttgcgcaccgtggcagcgcccggcgggcggtcctgccagccccgacgggatgcccgcagccatgctcccctacgcttgcgtcctggtgcttttgggagcccacactgcaccggcggctggggaggccgggggcagctgcctgcgctgggaaccccactgccagcagcccttgccagatagagtgcccagcactgcgatcctgcctccacgccttaatggaccttggatctccacaggctgcgaggtgcgcccaggaccggagttcctgacccgcgcctacaccttctaccccagccggctctttcgagcccaccagttctactacgaggaccccttctgcggggaacctgcccactcgctgctcgtcaagggcaaagtccgcctgcgccgggcctcctgggtcacccggggagccaccgaggccgactaccacctgcacaaggtgggcatcgtcttccacagccgccgggccctggtcgacgtcaccgggcgcctcaaccagacccgcgccggccgggactgcgcgcggcggctgcctccggcccgggcctggctgcctggggcgctgtacgagctgcggagcgcccgggctcagggggactgcctggaggcgctgggcctcaccatgcacgagctcagcctggtccgcgtgcagcgccgcctgcagccgcagccccgggcgtcgccccggctggtggaggagctgtacctgggggacatccacaccgacccggcggagaggcggcactaccggcccacgggctaccagcgcccgctgcagagcgcactgcaccacgtgcagccgtgcccagcctgtggcctcattgcccgctccgatgtgcaccacccgcccgtgctgccgccccctctggccctgcccctgcacctgggcggctggtgggtcagctcggggtgcgaggtgcgcccagcagtcctgttcctcacccggctcttcactttccacgggcacagccgctcctgggaagggtattaccaccacttctcagacccagcctgccggcagcccaccttcaccgtgtatgccgccggccgctacaccaggggcacgccatccaccagggtccgcggcggcaccgagctggtgtttgaggtcacacgggcccatgtgacccccatggaccaggtcaccacggccatgctcaacttctctgagccaagcagctgtgggggtgcgggggcctggtccatgggcactgagcgggatgtcacagccaccaacggctgcctaccgctgggcatccggctcccgcatgtggagtacgagcttttcaagatggaacaagaccccctcgggcaaagcctgctcttcatcggacaaaggcccaccgatggctcaagtcccgataccccagagaaacgtcccacctcctaccaagcacccctggtgctctgtcatggggaggcccccgacttctccaggccaccgcagcacaggccatcgctgcagaagcaccccagcacagggggtcttcacatagcccccttcccacttctgcccctagttctagggctggccttcctccactggctatgacattggacttgacatcaggatggcggctctggacacccattcaacccttcagactccctcctggcagctgtagggaaggaaccattctcctctgctctgtcatggatggatgcacagccccactgcttccaaactctgcctgtgtcccatgtggctcaggacatgagcttaacccctgcaaagcctataccacatcccacagcccgggtccccagtcaagcacttggatgcggcagtgatgttcatcgctacgtgagtttctaaagatcactcccaatttttctactttcctcatccttggcagctcgccaacaggttcagtcagggggccacacggaacacccccatcccatgttccccccagttcttcccatcctgacccttgggattccaagatgggagcaagaggagatcctgaggctctgcctagggacgaggcctacagttctgccatgtctgtaggttgttgtttaaagattattaattcgaatttagcaatacgatctctaagtggtgccatgaattaaagatgccacttcgggctttcagtgcttctcagcttttgggcaaagggcttgtgtcttcaggggcagctcagctttcctgagtcctgactgctggcactcgtctgcatttgcctgtgcttctgcgagtcggacctcaagctgccaacactgcatgtggataaatccagttttcccgggccagcatgcaaaatgaagaggactccatctaagctgagaagcatggcctccccagagcagcctgcggcctccaagccttcctggcccaggcaaatgccagtgtgcaccaggctggctgctgggggcaggtctttggaggggagcagcatttccagccttctgaacatagttaatagtaatgacagccgtaacactaacgcgctctgcaattcgccctgcccagccatcctcggttgccaagattgcctgtgcctgcctgacaaaggaagagaatctccgaatgtgtatctttgggcccaccctagggagaggtcggggtcaccaggctacatggcgacatctaggcagctccgccttgcccagcctccttgccataatcctaatatattggtgtcctctgctcagaggggactgtcatcatggtgggaacaggctgtgcctccccagggactctgcccatgttcccagggcctcatctgtacactgtgaaattaactggcatcctggtgggcccaagggttttcaggactgggggccaatgactcaccccctccttcctcctcctgatccctatctctagctcttatcacagattttgaacaattgtctgtgaggttaatgatggtttcagagggaagcccttttcctccctgagactgtgtggggttcagtcagcctgctgaaattgcttccacttattacccatccttcctcttaaaaaaaaaaaaagcccaccaagttagtattctctgtagctctcagacagctacaagtgttcctggcatatttaccaaagtacaagaaatcattacattatttacggtctcagactacatcagggttgggggagctcctggtggggatggcagtgggtgtcgatgatatgtccacggctgagcaggtcttgtatccgaagcttgaagtaaccatgccaccatttatcatcaaatttgaaccttttaataaaattaaacagcctgaaaaaaaaaaaaaaaaaa

SEQ ID NO: 8173 - DNA, 663 bp, Homo sapiens
ggctggtcagctccagacagacagaagaaagggattcttttcagtctagaaaaatgctcaccccttcctcagaacatttccactgtgacgaaaagagactgatgaagcctcagagagaaaggcaactctgggtggacagcaatagtgcagaatccagaatggatgtcctctttgtagccatctttgctgtgccacttatcctgggacaagaatatgaggatgaagaaagactgggagaggatgaatattatcaggtggtctattattatacagtcacccccagttatgatgactttagtgcagatttcaccattgattactccatatttgagtcagaggacaggctgaacaggttggataaggacataacagaagcaatagagactaccattagtcttgaaacagcacgtgcagaccatccgaagcctgtaactgtgaacccagtaacaacggaacctagtccagatctgaacgatgccgtgtccagtttgcgaagtcctattcccctcctcctgtcgtgtgcctttgttcaggtggggatgtatttcatgtagaaggtggaagaaggctgctatgactctttggatgggagtctggcaagaggaaattggaagataaaataaataataagtgaaataaagaaaaaaaaaaaaaaaaaaaaaa

SEQ ID NO: 8174 - DNA, 1564 bp, Homo sapiens
gacaactacattaccatgctgtgcctcagtttacccatttgtaaaatgggattaataatacttacctacctcacaggggtgttgtgaggctctattcatttgctcctttattctttcctgtattctctgtatgtccagcactttgtagccatgggaggaaagggactataaaagtgtacaatgttaatggaatgatacggtacctgaaagccttgttttctagtaagaaaatgctaccttgctgtacatacttataaccttgtatttggaaatgagaaataggtttatattttcagatctctcaaaaatcacatcatttgaccaaagaataatttaagacacatagaacagatttttttaatttatattttcatcctgaccagcttagttctaataatttttagttgtgagtgattaaaaaactttggatcaattttgggtcaaacatgccaactttgtagtctgagtgacaggcaaggatttttggggtttaaggatgcacttttagcacacatttgtatttcccttggcatatcagattgagctaatggtgatgttatttcaatctaacagccaccaatctgaaattgtatttcaaatgttgattctgtagttctttaaataataatgaagctcatcttatacattttgctttcaccaattgattccttcttcttttagcccactattaaaacatttcttactgaatggttcatgtaggcttgctgaacagcacgcattacttgcttcctggaagagttcccccattcatccatttgtcccattagttgctgtggattatcaagttttgaaggaactgtacatcccaacagactgaaacattctaagtgaaatgagtataatccaagtaactggtgaacctttggaggtttggagcttgaagagaatggctaagaagatttgaattatagggagggaacagaaatcatacatgaaaaggttttactgagaaagggaaaaccttaaatagagggacatgtgaaaacaaaatcatttgaaattttgattcagacatccatttccagtgggcaaccaagccaaagcctgaaccccttaaacccaaatgataagtgaaacttgggtgggtttatccaatgcctccaagcaaccaatgtcctgggaatatcattaaagtaacaagtgctgggttaatccaaaaaaaacattcccctgctgggccgaaccaatacccataagccctgtaattattcctaagccactttgatcccacaaaatatacttgtttgtaacaagctcccccatattctgctcctttaattatcaaaattctttaaaataccaaaattgggctatggcgatttttggaaaaaaaatcccctttctgaatcctttaagcccagtttgtcccattggagggccccccctcggcttgccaatggcccaaacaacgaaaccctgtggttccttccccacctagtaatcccccaatacacagggggatctcacataaggggaactcacctctcctagggtgtcacaacaatactactcttttcaaaaaaacaatgtctaacatactcca

SEQ ID NO: 8175 - DNA, 1235 bp, Homo sapiens; identical to SEQ ID NO: 6408
  misc_feature (391)..(405): n is a, c, g, or t

SEQ ID NO: 8176 - DNA, 1849 bp, Homo sapiens
  misc_feature (2)..(191): n is a, c, g, or t
  misc_feature (193)..(207): n is a, c, g, or t
  misc_feature (210)..(212): n is a, c, g, or t
  misc_feature (214)..(218): n is a, c, g, or t
  misc_feature (220)..(228): n is a, c, g, or t
  misc_feature (236)..(240): n is a, c, g, or t
  misc_feature (242)..(243): n is a, c, g, or t
  misc_feature (246)..(247): n is a, c, g, or t
  misc_feature (250)..(251): n is a, c, g, or t
  misc_feature (254)..(268): n is a, c, g, or t
  misc_feature (274)..(274): n is a, c, g, or t
  misc_feature (276)..(276): n is a, c, g, or t
  misc_feature (295)..(296): n is a, c, g, or t
  misc_feature (304)..(304): n is a, c, g, or t
  misc_feature (309)..(311): n is a, c, g, or t
  misc_feature (346)..(347): n is a, c, g, or t
  misc_feature (358)..(362): n is a, c, g, or t
  misc_feature (374)..(375): n is a, c, g, or t
  misc_feature (391)..(391): n is a, c, g, or t
  misc_feature (397)..(397): n is a, c, g, or t
  misc_feature (421)..(422): n is a, c, g, or t
  misc_feature (442)..(443): n is a, c, g, or t
  misc_feature (453)..(453): n is a, c, g, or t
  misc_feature (457)..(457): n is a, c, g, or t
gnnnnnnnnnnnnnnnnnnnnnnnnnnnnnnnnnnnnnnnnnnnnnnnnnnnnnnnnnnnnnnnnnnnnnnnnnnnnnnnnnnnnnnnnnnnnnnnnnnnnnnnnnnnnnnnnnnnnnnnnnnnnnnnnnnnnnnnnnnnnnnnnnnnnnnnnnnnnnnnnnnnnnnnnnnnnnnnnnnnnnnnnnnnnnntnnnnnnnnnnnnnnnccnnngnnnnnannnnnnnnntgggccannnnnannccnnggnnaannnnnnnnnnnnnnntgggcnanttcacctggtaaacccaanntgaatccnttgannnttgcctttcccccaatgttcctggcctgggtgagnnagctcccagannnnncaatcctccttnnccccccatacctcggnccacgncggtatgagaagggacctgggccnnagtgggtgtgcgctgagccnnccacgagagnctcnagtgtgatgagtggagtgttaacagtgtagggaaaatagagtgtgtatcagcagagaccaccgaagactgcatcgccaagatcatgaatggagaagctgatgccatgagcttggatggagggtttgtctacatagcgggcaagtgtggtctggtgcctgtcttggcagaaaactacaataagagcgataattgtgaggatacaccagaggcagggtattttgctgtagcagtggtgaagaaatcagcttctgacctcacctgggacaatctgaaaggcaagaagtcctgccatacggcagttggcagaaccgctggctggaacatccccatgggcctgctctacaataagatcaaccactgcagatttgatgaatttttcagtgaaggttgtgcccctgggtctaagaaagactccagtctctgtaagctgtgtatgggctcaggcctaaacctgtgtgaacccaacaacaaagagggatactacggctacacaggcgctttcaggtgtctggttgagaagggagatgtggcctttgtgaaacaccagactgtcccacagaacactgggggaaaaaaccctgatccatgggctaagaatctgaatgaaaaagactatgagttgctgtgccttgatggtaccaggaaacctgtggaggagtatgcgaactgccacctggccagagccccgaatcacgctgtggtcacacggaaagataaggaagcttgcgtccacaagatattacgtcaacagcagcacctatttggaagcaacgtaactgactgctcgggcaacttttgtttgttccggtcggaaaccaaggaccttctgttcagagatgacacagtatgtttggccaaacttcatgacagaaacacatatgaaaaatacttaggagaagaatatgtcaaggctgttggtaacctgagaaaatgctccacctcatcactcctggaagcctgcactttccgtagaccttaaaatctcagaggtagggctgccaccaaggtgaagatgggaacgcagatgatccatgagtttgccctggtttcactggcccaagtggtttgtgctaaccacgtctgtcttcacagctctgtgttgccatgtgtgctgaacaaaaaataaaaattattattgattttaataaaaaaaaaaaaaaaaaaactttcctaaatattttcaacaaaggatttctttatgcattctgcctaaatacctatgcaactgagcccttccttctcagctcaagattcgtctggtctttccctacagctttgtgtgtgccatggccacatctcctgggtacagttcaaggagacatcttttctaaaagggtctgcgtgatcattaaaatataatcaaatgtaaaaaaaaaaaaaaaaaaacgcgg

SEQ ID NO: 8177 - DNA, 2749 bp, Homo sapiens
gatcacacaggaagctgagtacttcctacttggtcaggatcttgaaacttgaattcataaaaacccggcacgagcccagaaacaaagacttcacggacaaagtcccttggaaccagagagaagccgggatggaaactccaaacaccacagaggactatgacacgaccacagagtttgactatggggatgcaactccgtgccagaaggtgaacgagagggcctttggggcccaactgctgccccctctgtactccttggtatttgtcattggcctggttggaaacatcctggtggtcctggtccttgtgcaatacaagaggctaaaaaacatgaccagcatctacctcctgaacctggccatttctgacctgctcttcctgttcacgcttcccttctggatcgactacaagttgaaggatgactgggtttttggtgatgccatgtgtaagatcctctctgggttttattacacaggcttgtacagcgagatctttttcatcatcctgctgacgattgacaggtacctggccatcgtccacgccgtgtttgccttgcgggcacggaccgtcacttttggtgtcatcaccagcatcatcatttgggccctggccatcttggcttccatgccaggcttatacttttccaagacccaatgggaattcactcaccacacctgcagccttcactttcctcacgaaagcctacgagagtggaagctgtttcaggctctgaaactgaacctctttgggctggtattgcctttgttggtcatgatcatctgctacacagggattataaagattctgctaagacgaccaaatgagaagaaatccaaagctgtccgtttgatttttgtcatcatgatcatcttttttctcttttggaccccctacaatttgactatacttatttctgttttccaagacttcctgttcacccatgagtgtgagcagagcagacatttggacctggctgtgcaagtgacggaggtgatcgcctacacgcactgctgtgtcaacccagtgatctacgccttcgttggtgagaggttccggaagtacctgcggcagttgttccacaggcgtgtggctgtgcacctggttaaatggctccccttcctctccgtggacaggctggagagggtcagctccacatctccctccacaggggagcatgaactctctgctgggttctgactcagaccataggaggccaacccaaaataagcaggcgtgacctgccaggcacactgagccagcagcctggctctcccagccaggttctgactcttggcacagcatggagtcacagccacttgggatagagagggaatgtaatggtggcctggggcttctgaggcttctggggcttcagtcttttccatgaacttctcccctggtagaaagaagatgaatgagcaaaaccaaatattccagagactgggactaagtgtaccagagaagggcttggactcaagcaagatttcagatttgtgaccattagcatttgtcaacaaagtcacccacttcccactattgcttgcacaaaccaattaaacccagtagtggtgactgtgggctccattcaaagtgagctcctaagccatgggagacactgatgtatgaggaatttctgttcttccatcacctccccccccccgccaccctcccactgccaagaacttggaaatagtgatttccacagtgactccactctgagtcccagagccaatcagtagccagcatctgcctccccttcactcccaccgcaggatttgggctcttggaatcctggggaacatagaactcatgacggaagagttgagacctaacgagaaatagaaatggggaactactgctggcagtggaactaagaaagcccttaggaagaatttttatatccactaaaatcaaacaattcagggagtgggctaagcacgggccatatgaataacatggtgtgcttcttaaaatagccataaaggggagggactcatcatttccatttacccttcttttctgactatttttcagaatctctcttcttttcaagttgggtgatatgttggtagattctaatggctttattgcagcgattaataacaggcaaaaggaagcagggttggtttcccttctttttgttcttcatctaagccttctggttttatgggtcagagttccgactgccatcttggacttgtcagcaaaaaaaaaaaataataataataataaggcctgctgtgtaagctgacagtatttgtagctgatagggggttgggaggaaagtgtctactaggagggtggggtgagattctgtgttgatgtaggaggccgagaaggcccttaactcaaagtagcttatttatccaaaatgttctggatgcatcatctccaaccaaggaccccttatttatcatgcctttgttctcttttccctcagatgtatatttctttaaaaataattttcctaataacaaaacttatttctaaaacagcttaaaaattcaaagaaaaaccccaaacactgacattacctacacttccactacccaaagacaaaatgtgcccactgtgtgcttttgagtgtattttcttttagtttgttttttgttgggtgcatatttatgataataacaatgatggacttcaattgtactcactgttctattgttggttttaattagcagcaagttgtgatcactttcccaggtgaataaatcatttcaaagcattaaaaaaaaaaaaaaaaa

SEQ ID NO: 8178 - DNA, 3754 bp, Homo sapiens
  misc_feature (1516)..(1516): n is a, c, g, or t
  misc_feature (1994)..(2009): n is a, c, g, or t
ggcacgagggctggagcccgcggagcccacggagcccacggaggagcccacggaggagccccagcgtccgaacgggcagaccccctcgagccgcgaaggagcccgagaagcagccacgatgtgcggaatctttgcctacatgaactacagagtcccccggacgaggaaggagatcttcgaaaccctcatcaagggcctgcagcggctggagtacagaggctacgactcggcaggtgtggcgatcgatgggaataatcacgaagtcaaagaaagacacattcagctggtcaagaaaagggggaaagtcaaggctctcgatgaagaactttacaaacaagacagcatggacttaaaagtggagtttgagacacacttcggcattgcccacacgcgctgggccacccacggggtccccagtgctgtcaacagccaccctcagcgctcagacaaaggcaacgaatttgttgtcatccacaatgggatcatcacaaattacaaagatctgaggaaatttctggaaagcaaaggctacgagtttgagtcagaaacagatacagagaccatcgccaagctgattaaatatgtgttcgacaacagagaaactgaggacattacgttttcaacgttggtcgagagagtcattcagcagttggaaggtgcattcgcgctggttttcaagagtgtccactacccaggagaagccgttgccacacggagaggcagccccctgctcatcggagtccggagcaaatacaagctctccacagaacagatccctatcttatacaggacgtgcactctggagaatgtgaagaatatctgtaagacacggatgaagaggctggacagctccgcctgcctgcatgctgtgggcgacaaggccgtggaattcttctttgcttctgatgcaagcgctatcatagagcacaccaaccgggtcatcttcctggaggacgatgacatcgccgcagtggctgatgggaaactctccattcaccgggtcaagcgctcggccagtgatgacccatctcgagccatccagaccttgcagatggaactgcagcaaatcatgaaaggtaacttcagtgcgtttatgcagaaggagatcttcgaacagccagaatcagttttcaatactatgagaggtcgggtgaattttgaaaccaacacagtgctcctgggtggcttgaaggaccacttgaaggagattcgacgatgccgacggctcatcgtgattggctgtggaaccagctaccacgctgccgtggctacgcggcaagttttggaggaactgactgagcttcctgtgatggttgaacttgctagtgattttctggacaggaacacacctgtgttcagggatgacgtttgctttttcatcagccagtcaggcgagaccgcggacaccctcctggcgctgcgctactgtaaggaccgcggcgctctcaccgtgggcgtcaccaacaccgtgggcagctccatctctcgcgagaccgactggcgcgtcacatcaacncagggcccggaggtcggcgtggcccaacaccaaggcttataccagtcagttcatctctctggtgatgtttggtttgatgatgtctgaagaccgaatttcactacaaaacaggaggcaagagatcatccgtggcttgagatctttacctgagctgatcaaggaagtgctgtctctggaggagaagatccacgacttggccctggagctctacacgcagagatcgctgctggtgatggggcggggctacaactatgccacctgcctggaaggagccctgaaaattaaagagataacctacatgcactcagaaggcatcctggctggggagctgaagcacgggcccctggcactgattgacaagcagatgcccgtcatcatggtcattatgaaggatccttgcttcgccaaatgccagaacgccctgcagcaagtcacggcccgccagggtcgccccattatactgtgctccaaggacgannnnnnnnnnnnnnnnagtttgcgtataagacaattgagctgccccacagtggactgcctccagggcatcctgagcgtgattccgctgcagctgctgtccttccacctggctgttctccgaggatatgacgttgacttccccagaaatctggccaagtctgtaactgtggaatgaggctgagaccgtgacaagaccatcaccacctttcatctgattccagacctgtcccaacagcagggatgctacatgggaagagaagtggacatcccacatgttctgcgtgctcctgtagagcttgacagcttccacgtgccttctacccaagtgcttttgcttacagcagatactgtttctctgtgtcctgaagtcgccagaggagaagggaatcattgttacacatggggatacagagcagacttctccactactgtgcaatagagatacagctctcttcagagtaactgtgaaccttttataaccaacactagagttagttttaaaagacaagatatttataatgacgactgtatagcttttaagttatttttctagtatgtggctttctgtagccgtggtaacggccaaactgttcatcctagctacccatgctctgtgtccaggcttgctcctggcaggtggcattcatctcagatgtgagcacaaggcattggccctctggactcctttctccttttctttcctctctaggctgctcctgaatcctgttctctgacatccgtggagcccctcctgcatccacctatgcctcctataagtccagttgaaatctcagcctccttcaacattttcttctcgtgtgtggcccacatccctccacttctccaacttctgtttaatctgatcacggctctttttaagccctggcagcattttggtccctgctccttgcccatagtaaaacagcttgaaatatcccatgcaagagagtagtttcaagtgggcaactctgctctctatttaaaagcgtgcacaatcaaaagtactatgcaattttaggacaataaagaacatacagtttctttgtgtgaaaaaaaaaaaaaaaaaaaaaaataaaccaaaacaacacagaccagaaacaacaaaaaaaaaaaaagggggcgggccgcctcaaaagaatcccttcgaggggccccaagctttaccgcgaacaccagcttttctttgtaaaaaggtggccccctaataggggagccccaatttaataacctagggcacctggcgccgcggtttttaacaacccccggagaacgtggaaaaaactgggctaacttgtgggaaccttttggcggaaagcaaacccttaactcctttggggggggggggcccataatttgtgggaacacccatacccttcaccaaaaaattttttagagcctcctcagaggttacaatataaacaacaactttcataagagcggccaaaaaggtggcggcacaaacctcagccctcgcccactattcttcccttgtttctcgccaaaaaagttcccggccccaccccggcgcgcataacattatcttgtcaccgtcctcttcgttaccccgcggacgttggcgcttggcaatgccacagccaggccgaggtggaggtatgttaaaggcatgatcactgcgcctcccgcggagctgtctacatctcaatgcgcgcccacgccagagtaatcccacacacgtgtctctaagaacactgctccctctaatactaacacaccctgtcaactaacctcctatacctacac

SEQ ID NO: 8179 - DNA, 2934 bp, Homo sapiens
agcggggtcgcgaggctccgtctccccggcgcggcccgctcgccgtccggctcgctcagggcctgggcagacgcggccgcccgagctaccgcgggttccgagacgccttcgcactgctcctccacccgggggatctttgttcccggagcgggtgcggggcgggaccggcccggcctatatattgggttggcgccggcgccagctgagccgagcggtagctggtctggcgaggttttatacacctgaaagaagagaatgtcaagacgaagtagccgtttacaagctaagcagcagccccagcccagccagacggaatccccccaagaagcccagataatccaggccaagaagaggaaaactacccaggatgtcaaaaaaagaagagaggaggtcaccaagaaacatcagtatgaaattaggaattgttggccacctgtattatctggggggatcagtccttgcattatcattgaaacacctcacaaagaaataggaacaagtgatttctccagatttacaaattacagatttaaaaatctttttattaatccttcacctttgcctgatttaagctggggatgttcaaaagaagtctggctaaacatgttaaaaaaggagagcagatatgttcatgacaaacattttgaagttctgcattctgacttggaaccacagatgaggtccatacttctagactggcttttagaggtatgtgaagtatacacacttcatagggaaacattttatcttgcacaagacttttttgatagatttatgttgacacaaaaggatataaataaaaatatgcttcaactcattggaattacctcattattcattgcttccaaacttgaggaaatctatgctcctaaactccaagagtttgcttacgtcactgatggtgcttgcagtgaagaggatatcttaaggatggaactcattatattaaaggctttaaaatgggaactttgtcctgtaacaatcatctcctggctaaatctctttctccaagttgatgctcttaaagatgctcctaaagttcttctacctcagtattctcaggaaacattcattcaaatagctcagcttttagatctgtgtattctagccattgattcattagagttccagtacagaatactgactgctgctgccttgtgccattttacctccattgaagtggttaagaaagcctcaggtttggagtgggacagtatttcagaatgtgtagattggatggtaccttttgtcaatgtagtaaaaagtactagtccagtgaagctgaagacttttaagaagattcctatggaagacagacataatatccagacacatacaaactatttggctatgctggaggaagtaaattacataaacaccttcagaaaagggggacagttgtcaccagtgtgcaatggaggcattatgacaccaccgaagagcactgaaaaaccaccaggaaaacactaaagaagataactaagcaaacaagttggaattcaccaagattgggtagaactggtatcactgaactactaaagttttacagaaagtagtgctgtgattgattgccctagccaattcacaagttacactgccattctgattttaaaacttacaattggcactaaagaatacatttaattatttcctatgttagctgttaaagaaacagcaggacttgtttacaaagatgtcttcattcccaaggttactggatagaagccaaccacagtctataccatagcaatgtttttcctttaatccagtgttactgtgtttatcttgataaactaggaattttgtcactggagttttggactggataagtgctaccttaaagggtatactaagtgatacagtactttgaatctagttgttagattctcaaaattcctacactcttgactagtgcaatttggttcttgaaaattaaatttaaacttgtttacaaaggtttagttttgtaataaggtgactaatttatctatagctgctatagcaagctattataaaacttgaatttctacaaatggtgaaatttaatgttttttaaactagtttatttgccttgccataacacattttttaactaataaggcttagatgaacatggtgttcaacctgtgctctaaacagtgggagtaccaaagaaattataaacaagataaatgctgtggctccttcctaactggggctttcttgacatgtaggttgcttggtaataacctttttgtatatcacaatttgggtgaaaaacttaagtaccctttcaaactatttatatgaggaagtcactttactactctaagatatccctaaggaatttttttttttaatttagtgtgactaaggctttatttatgtttgtgaaactgttaaggtcctttctaaattcctccattgtgagataaggacagtgtcaaagtgataaagcttaacacttgacctaaacttctattttcttaaggaagaagagtattaaatatatactgactcctagaaatctatttattaaaaaaagacatgaaaacttgctgtacataggctagctatttctaaatattttaaattagcttttctaaaaaaaaaatccagcctcataaagtagattagaaaactagattgctagtttattttgttatcagatatgtgaatctcttctccctttgaagaaactatacatttattgttacggtatgaagtcttctgtatagtttgtttttaaactaatatttgtttcagtattttgtctgaaaagaaaacaccactaattgtgtacatatgtattatataaacttaaccttttaatactgtttatttttagcccattgtttaaaaaataaaagttaaaaaaatttaactgcttaaaagtaaaaaaaaaaaaaaaaaaagtactgcaccagcaaatccatgatgatgataatgtcgacc

SEQ ID NO: 8180 - DNA, 1916 bp, Homo sapiens
  misc_feature (1881)..(1903): n is a, c, g, or t
ggcacgaggggcggcgtaggggcggaggtcgcgcctgagtgcgtccgcacgagagggcggaaccgtctccatggcaacccgcgcgcagccggggccactcagccaggcgggaagcgctggtgttgcggcgctggcgacagtcggggttgcgagcggcccggggccggggcggccagggccgctgcaggacgagaccctgggtgtggcgtccgtgccctcgcagtggagggccgtccagggcatccgcggggagacgaaaagttgccagacggccagcattgccactgccagtgcatccgcccaggccaggaatcatgtggacgcccaggtgcagacggaggcccccgtgcctgtcagcgtgcagcccccgtcccagtacgacatacccaggctcgcagcctttcttcggagagtggaggccatggtcatccgagagctgaacaagaattggcagagccacgcgtttgatggcttcgaggtgaactggaccgagcagcagcagatggtgtcttgtctgtataccctgggctacccgccagcccaagcgcagggtctgcatgtgaccagcatctcctggaactccactggctctgtggtggcctgtgcctacggccggctggaccatggggactggagcacgcttaagtccttcgtgtgtgcctggaacctggaccggcgagacctgcgtccccagcaaccgtcggccgtggtggaggtccccagcgctgtcctgtgtctggccttccaccccacgcagccctcccacgtcgcaggagggctgtacagtggtgaggtgttggtgtgggacctgagccgtcttgaggacccgctgctgtggcgcacaggcctgacggatgacacccacacagaccctgtgtcccaggtggtgtggctgcccgagcctgggcacagccaccgcttccaggtgctgagtgtggccactgacgggaaggtgctactctggcagggcatcggggtaggccagctgcagctcacagagggcttcgccctggtcatgcagcagctgccacggagcaccaagctcaagaagcatccccgcggggagaccgaggtgggcgccacggcagtggccttctccagctttgaccctaggctgttcattctgggcacggaaggcggcttcccgctcaagtgttccctggcagctggagaggcagccctcacgcggatgcccagctccgtgcccctgcgggccccagcacagtttaccttctccccccacggcggtcccatctactctgtgagctgttcccccttccacaggaatctcttcctgagcgctgggactgacgggcatgtccacctgtactccatgctgcaggcccctcccttgacttcgctgcagctctccctcaagtatctgtttgctgtgcgctggtccccagtgcggcccttggtttttgcagctgcctctgggaaaggtgacgtgcagctgtttgatctccagaaaagctcccagaaacccacagttttgatcaagcaaacccaggatgaaagccctgtctactgtctggagttcaacagccagcagactcagctcttggctgcgggcgatgcccagggcacagtgaaggtgtggcagctgagcacagagttcacggaacaagggccccgggaagctgaggacctggactgcctggcagcagaggtggcggcctgaggggtcccgggaggcgggtgcaagccttcgctgtgccgagccttgtgtttctgacgcaagccaaatgaagaaaagcaaagcttaaaaaaaaaaaaaaaaaaaaaaaaaaaaaaataatgaaataattaaaaattaattcctcgaggggggggccccggtcccccaattcccgcccttattgggggagttctgtttttttnnnnnnnnnnnnnnnnnnnnnnnagcaaggggtcgg

SEQ ID NO: 8181 - DNA, 2672 bp, Homo sapiens
cccagtccagcctccctactcagggccgagggcaccaggaggatggtcgttgcaaaagaatatgggaggccgggtgcggcggctcacgcctgtaatcccagtacttctgggaggccaaggggggcggatgacttgaggccgtgcaacacctgccagcaccagcatttgacacggaatcgaagaaaacaggcaggacataccctgactacactagtacaagtcatcggcgtctcggggtcctgggttttagaaatcacactgtcagggagggctgatggggtcctgggttggaggctggaagtggaggaatcgaggcataggcagaaacttgaaggaagggtcagccgagctggccagaagggggctcctcgccacggtccccagggaagcactttgctcatgggccccggccctgagagaggagctcctgcctcttcccactcggagagggctgacaggagaggcttggcctggtgtttcctgatgagatagcgggcacgttccgggaagcggtgagcaggcccagcagacatcagatgtggtgcttcctgtctcctgtgaatgcgcctggcccttgaggggggtctgggatggagagtcgggggaggggaaccccactcgcccttctccttgttgttcttggcagctggacttgggcaattgtgcctccaccctctggaggggcctccccctgtgctggctgcagatcagaggggcgatggggagggatccaccggtccaggcgggggctcaccttccagacccgggcgtgggcgagaggggtgcatgggaggacgcccgatgcctcagggcccccggtcagcagcgaggcacagactctcctctgggcggtgatggccctgcacgaggtccgtgtgccgtctgcctgcacagggagaggaaaggatcacgcgaccatgggtacgttggccacctgaaggttgagtcccgcagcctagagactggagcgtggggaccaggaggagcttcttagcggaactgggctggggctcatgcagccctccaggagcccccgacgcgacgccctggctcatcccgggtgaagaggctgctgagtctgaactgatgacagtggacgggtggccgccggttcccaacgcatggttgggcctggaacccaggtgactctgggagatgtggtcacagtcacagccgtctgtgggcctttgggttcaaaacagcgcgagtcacaggagacagaagggaatctgagcttgcgattgctcattcttgtcaccctcctggctctgggacacctctgccatctcctaccaagggtaccccattcctggcgagttggaaagtggcctcatgggcagaaaacgagggcaaagggagctgcgtgctgtgagagacgtccccgcacccaccctccccaccagctcccttgggcctttcctccctcccagccccacccacagccgggtggctcccttcactgtctctcctgggtttaactcagaggctggcgagcaggggctgaccagtgtgtgtcggagactctccgagtggccagcacgggcagggagctcataggcttggccctgagaccaggtcctgtctgagaaggaggcaggtcctgtctgagaagaaggacccccacccctcctgcctgggaccctgccttaggctcactctaatgacctaatttcaatttgattgaatgcaaatcttcatttgctagaagacctgatttcatctttccgggttcagtaaacatgacattctccgtgggggtttatttgtggaactcccagtcggagctgctgccccagcccagcagggctcagcgacgtgcactggttttaggagtaaatccgaagcaacagaagcgttcgcactggctctgggtgcagcctgcatcttcagccctggggcactgatgctgggcagcttctcggcttcactcgggaagggactcaggagcgaggtggtggggaagccagcagcttggctgaggcggcagtggaggtggtccagctccgcgactgctcccacagagcagggctgccgctcggtcagtgtgcagagtgcagccgcttggggccaacttgccatcatatgtataaccacttttaatgacatgctaattaggggacgggttattcagatatagctggaggatgggcagttgcttccaggtgttgccaaggcagtgagagcaacgggaactgcccttggcgcctcttccagctttggcctgtctttggtcgggtccggggaccaggcttgcctaccacgttttctgtgtcaaaacagtcacgcagaaataaacagtgacagcactgtgatgagaaaagcgaagaaacaacttatttcaactttctgacttttgttgtggcctcagcacttttgtttgtgcttaacattgaaaacagtgaggcagtgtaaactgtgagatgtgatttttcatttggtaagtgcaaattttagttcattcatgaaaccaattttgaagatctttaaaatagaatttagtcgaccttaagaattgttaattgtttacaactaaagaccaaaaatccaagagaataaagcgttgcaccagtgaaaaaaaaaaaaaaaaaaaaaaattgtaccttttacagatgtttcattttattaaaactcactagtcactgggttttctattcaaaaaaaaaaaaaaaaaa

SEQ ID NO: 8182 - DNA, 5165 bp, Homo sapiens
  misc_feature (4718)..(4718): n is a, c, g, or t
  misc_feature (4757)..(4757): n is a, c, g, or t
  misc_feature (4848)..(4871): n is a, c, g, or t
agcgggtgcgtgggggtaaccggcgcgggcgccgagatagcgccgggcagagggacccggctaccctggacagcgcatcgccgcccgcccgggtcgccgcgccacagccgctgcggatcatggaacatctaaaggcctttgatgatgaaatcaatgcttttttggacaatatgtttggaccgcgagattctcgagtcagagggtggttcacgttggactcttaccttcctaccttttttcttactgtcatgtatctgctctcaatatggctgggtaacaagtatatgaagaacagacctgctctttctctcaggggtatcctcaccttgtataatcttggaatcacacttctctccgcgtacatgctggcagagctcattctctccacttgggaaggaggctacaacttacagtgtcaagatcttaccagcgcaggggaagctgacatccgggtagccaaggtgctttggtggtactatttctccaaatcagtagagttcctggacacaattttcttcgttttgcggaaaaaaacgagtcagattacttttcttcatgtatatcatcatgcttctatgtttaacatctggtggtgtgtcttgaactggataccttgtggacaaagtttctttggaccaacactgaacagttttgtccacattcttatgtactcctactatggactttctgtgtttccatctatgcacaagtatctttggtggaagaaatatctcacacaggctcagctggtgcagttcgtgctcaccatcacgcacaccatgagcgccgtcgtgaaaccgtgtggcttccccttcggttgtctcatcttccagtcatcttatatgctaacgttagtcatcctcttcttaaatttttatgttcagacataccgaaaaaagccaatgaagaaagatatgcaagagccacctgcagggaaagaagtgaagaatggtttttccaaagcctacttcactgcagcaaatggagtgatgaacaagaaagcacaataaaaatgagtaacagaaaaagcacatatactagcctaacagattggcttgttttaaagcaaagactgaattgaaggttacatgttttaggataaactaatttcttttgagttcataaatcatttgtacccagaatgtattaatatattgctattaggttaatctgttaactgaatgctttgatcagcattgaggtgatgctcacctccgaggacctcagaactggtgcagcttctctctccctccctcccacagactgaacctttcgccagaagctgtccttataacgccttatacgcatacacagccaggaaacgtggagcattgtttctcacagagagtctccaaataaaaagggttttgttcagattaaaatgtttacaacaaaatgttaattatattctaaatacagggtatgttctaatctatattaagcaataatgccagtgcataatcattccatttgttcctttagcaatcaaccccagaaaatattaaaatgggatcatacacagaagatagaaaaatctagcaaaacttctctttctgtaagccagagtcttgtctatcagattcccacaaccactcctgattctaaatttagtgatatggtaatgaaattggtatttattttaaatattagttattctaaggagaaaaaaatgcttctgcaagattttcataattcaggggctgtggataggattgttcctctgtttccctaatcattcatctgttcatgtctccctcttgtgccagtcagcctaggttatacagatgccatgctccacaccacgagcagtgtacaaatctggctgcccgtttactttctgagcaagcactggagtccactccgacctttttctttgaacatgcatgctgctggaatatgtataaatcagaactagcagaagtagcagagtgatgggagcaaaataggcactgaattcgtcaactcttttttgtgagcctacttgtgaatattacctcagatacctgttgtcactcttcacaggttatttaagttcttgaagctgggaggaaaaagatggagtagcttggaaagattccagcactgagccgtgagccggtcatgagccacgataaaaaatgccagtttggcaaactcagcactcctgttccctgctcaggtatatgcgatctctactgagaagcaagcacaaaagtagaccaaagtattaatgagtatttcctttctccataagtgcaggactgttactcactactaaactctaccaagaatggaaaccaagaatattttctgaagatttttttgaagattaatttataccctataaaataaaacttgttagcttcgatgaagtcaaaaaaaaaaaaaaaaaaaaatatttttttaaataagtttttaggtcctgacactgacatcaaatacatgcacaccagaaaggcatttccaccaccgtccccactcattagcgtccagagtgcctttctctctcggctttttttcccccctgagctctagttttaaactttctcctgttaaaaaaattgtacttttatttcatgtaaactgcccctctgaggatttgggcatattttttggaaggtgcctaatgcttaggatagtctctagggtgatgcactgcacctgcttccttcccttcagtgcggccgacccatttctgttgaacagatgtctcctgtgtgatgcccctgactcttacatttatctttctaaatcattttctgaagctgacttgctctagggtgcttcatcaccacttccatcttgcatcaccttataactgttctgtcttgttctctcccagcaatttattttaaaacaagggctagcttcaagcatgactgttaatggctcctctgtgacaaaacacaagttggaccaaggagaaagccctttggagaaactggaccctagttcagtttagatctcaaatataggctgaaatctcttaccaaagtgcgttccagataaaaatgagacttagaagacagactggtctaatatgctcactggtcatcacattcagcttattcttacgtgccagtgaggccctaaggtctcagtgcatagcatacctgccactctggatgttttcctgggcttcatatctgtatggcaaggagggagctgtccttcagcagacaaagtcaagcagctttaagtacaaggcagcttgaaacctctctgatgaaagtgaaaaatgtgggtagcttatactttcaaactaatgccagtgactagagagaggtttcattcatgatgtgtatttccaatttggtcttcaattcaagagatgcttcataaaacacttatagccttaaaccattcaagggctaattaaaaaaatagttatgaaatcttagccacaaaaaataaatcaggtaaacattttaacctgtcgttaagtgttgtaacttcaaaaaaccaaaatgcttattttaatgtgatttttctaaaactattgaaaaattaatatttctataatctattaaaaaaaatggagaatgttttctctcaaatttcctctgacccatgggaatgaaaatacttaaatactgtaaagcatatctattaataattcccccaattttttaaactaacaaaatggaatgttaactgaatggaattaaacatagcaattgtcaagccatcaaaattatatatcgaaccacttaggcatgttacggggtaaagtcctcacccctgcatttgagaaatattttattatttttattttaaggcaaaacagtgtttactgtgatgggcagaacagccttttgtatctaggagtccatttgagttctttccaatatttccatatcgttcataaatgtgtctgggggcttccttgtttggaaaatatggatatcgctttgttttcctttgaaagtaattatatcttaagaacatagtatcatgaatggagtagacagggaggctgcagaagccatttctctttgtagataaaaagcattatctatgattgttgtataataaattgatttttacattaaaaaaaaaaaaaaaaaaaagagggggacggctcttggaaatgtagggatgtaaggtattggagaagaggagtggcaaacagggagataagagaagatggtacgattataaatacgtataaaaggctccgtcgctcttcgggagaaatttatgaaaggggtggagtggcagagggggtggttgggtggctggggttggcgctagatctggcgttaaaataaaacggataacgttacgaggggagctagttgataaaaacacacccccaagaaaattgattgttcggagcaggggggtagagaggggagggggggaagggggggtatgaatcgagcgaagcggcgagcagcatgaagcttggggtggtggcgggggaggcgaagatgggtgggatggacgggcctgattggatcacgcattcagctcggtaatataatagagtgtctaccagcacagccatcggcgaggggaggtgcgggtggagacaaccatcgctcgatgtaacacgggcagaggaggaagtaggatgatgaggaattaccaaggaaaacgcggtgtgtgtgaaggtggcgggtgggtaagggggacgaggtaaagacggcgagataataatagaaattacgtgtcacttgacacttgacactccaccggcgcacagtctgacctatcggatgtgttacggcggcggnccccaccgaggggtgaatatcaaatagagggtgaggggngtaaccccgtgtcatattgagggcggggagcaggaaacgtcttaatgctagagtgtatatgcgcattctgcagtagattgagataatacannnnnnnnnnnnnnnnnnnnnnnnatatatacacacgcggttctcacttgagtggtaaggtgttcttggataggcggggaggtagaggggggctatggggatgctgaaacgagcgctggcgggacataggtgggagcactacctcaggacaatacaagtggaggaagtgacgggagtggtgtgttcgttgggtgcgatgggtgcttgtttggcaaatgttgttggccatgttgcacggcgccttcgactcggggggggggcctagggaggaggagtagaacttttggcggcaatattagttctaacttagaaggaagc

SEQ ID NO: 8183 - DNA, 4568 bp, Homo sapiens
  misc_feature (2239)..(2260): n is a, c, g, or t
  misc_feature (2966)..(3022): n is a, c, g, or t
  misc_feature (3911)..(3915): n is a, c, g, or t
cggctgcaggctgggagggagaagtgctacgcctttgcaggttggcgaagtggttccaggctacccggctagtctggcacggccccgtcttctgcctcctcctccgtcgcgtggcggcgggaactgttggccgcgcggcctcgggaacggcccaggtccccgcccgcaggtcccgggcagataacatagatcatcagtagaaaacttcttgaagttgttcaagaaaaatttgaaagtagcaaaatagaaaataaagaattaacagcagatacagaggacagcatggaagtgttgtcttaggaaacagaacacagcagtgaaaaaacagacaaaatccgctcagatacaactgcagctgataatgttttccggcttcaatgtctttagagttgggatctcttttgtcataatgtgcattttttacatgccaacagtaaactctttaccagaactgagtcctcagaaatattttagtacattgcaaccaggaaaagcctctttagcttatttttgtcaagctgattccccaagaacatctgtatttcttgaagaactgaatgaggctgttagacctctgcaggactatggaatttcagttgccaaggttaattgtgtcaaagaagaaatatcaagatactgtggaaaagaaaaggatttgatgaaagcatatttattcaagggcaacatattgctcagagaattccctactgacaccttgtttgatgtgaatgccattgtcgcccatgttctctttgctcttctttttagtgaagtgaaatatattaccaacctggaagaccttcagaacatagaaaatgctctgaaaggaaaagcaaatattatattctcatatgtaagagccattggaataccagagcacagagcagtcatggaagccggttttgtgtatgggactacataccaatttgtcttaaccacagaaattgcccttttggaaagtattggctctgaggatgtggaatatgcacatctctacttttttcattgtaaactagtcttggacttgacccagcaatgtagaagaacactaatggaacagccattgactacactgaacattcacctgtttattaagacaatgaaagcacctctgttgactgaagttgctgaagatcctcaacaagtttcaactgtccatctccaactgggcttaccactggtttttattgttagccaacaggctacttatgaagctgatagaagaactgcagaatgggttgcttggcgtcttctgggaaaagcaggagttctactcttgttaagggactctttggaagtgaacattcctcaagatgctaatgtggtcttcaaaagagcagaagagggagttccagtggaatttttggtattacatgatgttgatttaataatatctcatgtggaaaataatatgcacattgaggaaatacaagaagatgaagacaatgacatggaaggtccagatatagatgttcaggatgatgaagtggcagaaactgttttcagagataggaagagaaaattacctttggaacttacagtggaactaacagaagaaacatttaatgcaacagtgatggcttctgacagcatagtactcttctatgctggttggcaagcagtatccatggcatttttgcaatcctatattgatgtggcagttaaactgaaaggcacatctactatgcttcttactagaataaactgtgcagattggtctgatgtatgtactaagcaaaatgttactgaatttcctatcataaagatgtacaagaaaggcgagaacccagtatcttatgctggaatgttaggaaccgaagatctcctaaaatttatccagctcaacaggatttcatatccagtgaatataacatcgatccaagaagcagaagaatatttaagtggggaattatataaagacctcatcttgtattctagtgtgtcagtattgggactatttagtccaaccatgaaaacagcaaaagaagattttagtgaagcaggaaactacctaaaaggatatgttatcactggaatttattctgaagaagatgttttgctactgtcaaccaaatatgctgcaagtcttccagccctgctgcttgccagacacacagaaggcaaaatagagagcatcccactagctagcacacatgcacaagacatagttcaaataataacagatgcactactggaaatgtttccggaaatcactgtggaaaatcttcccagttatttnnnnnnnnnnnnnnnnnnnnnnattttgttcagtgatggcactgtaaatcctcagtataaaaaagcaatattgacactggtaaagcagaaatacttggattcatttactccatgctggttaaatctaaagaatactccagtggggagaggaatcttgagggcatattttgatcctctgcctccccttcctcttcttgttttggtgaatctgcattcaggtggccaagtatttgcatttccttcagaccaggctataattgaagaaaaccttgtattgtggctgaagaaattagaagcaggactagaaaatcatatcacaattttacctgctcaagaatggaaacctcctcttccagcttatgattttctaagtatgatagatgccgcaacatctcaacgtggcactaggaaagttcccaagtgtatgaaagaaacagatgtgcaggagaatgataaggaacaacatgaagataaatcggcagtcagaaaagaaccgattgaaactctgagaataaagcattggaatagaagtaattggtttaaagaagcagaaaaatcatttagacgtgataaagagttaggatgctcaaaagtgaactaattttatagggctgtggtttccaaaatttttttggcatgatagacttaatttatttccttaaagaataatattaaatcatttcaagtttgcagactagtgccatccaatagaattataatataagtcnnnnnnnnnnnnnnnnnnnnnnnnnnnnnnnnnnnnnnnnnnnnnnnnnnnnnnnnngcaaaataattttgatattacttttcacccagtagtatacccaaaatagcgaaatatagaaattattaatgagatattttacatccttttttgtaccaagtcttctaaatgcagtacatattttatacttactgcatttcttacttccgagtagccatatttcaagtgttccttgccacatgtggcctgtgactactgtattggacagttcagtactagacaaaaactagcataattaacttagttctagccatgatttctatttggattaaaattaaactctaatcacagttaactccacagtgcattcatgcagctgacagttatatttgttttattggagtcatgatattaaaatcagcgtttgtcaacctcaggggatatttagcaattgtcgggagacatttttgatgtcatgactagggcagttattgacatttagtgagtagaggccagggatcctgctaaataacctgcattggacagcgccccacaacaaagaattatcctgcccgaaatggtagtcgtgccaaggctgagtaaccttgtgttaaaagtaacctgtggcagactaggtttccagaatttcctggttctgctcacgtatcatgtttgaaaaaattttggctattaaagatatgtattagatggtcttatcctgattattacctggatacaacttgatcttttctaatattttcagaaagtgatgggataaccctagaagaggactcagaatgatatttatattttaagtgagtcttaaaacctcctcttatttctacaagttatatggctaaatttcagattgaacagggattcagcattctgccatctcctcatggaaagagaggctccctcatctgaagcgtctctgaaatctaccctnnnnncctgcagctcaacaacagtgactccctgagccacacggcctcattctgtgagggagggaaagattagccaaagagttaattttcattccaaatcacttagctgttagactgatctgtttgtagcagttgtttgtctcatttttgctctgtgcattttttgagacatttgttgagaatattctatttggtgctctactgtatttttctttttaatatctacttgatatcttgttctttaaattttcttcacatatggtttgcctgatacaactgatttttataactgaaatttaaggaatctaacagctaaaactcagtaagtgcatatatttccttataacatagacccgttgctactctcagcaccctctcctcaattttttttcctgtagcatgtgatgcctgattaaactcattttcatttgcttttatttctaatatgggaacaatgagagtgaactctaaatataggttgtagtaataaaacatcattagcctaattattagaaaatgctaattaagtaccagcacatagtaacatgaaattgcttagtcattgtacctttgtcagcaattttgacagtcattaatgtttgtcataattttaaataaagtgtctgggtttcagaataccttcaaaaaaaaaatagaag

SEQ ID NO: 8184 - DNA, 1081 bp, Homo sapiens
  misc_feature (1064)..(1064): n is a, c, g, or t
ttattgtggggcccaaagtgggggggaaattttgggggaaaagttttttttccaggggcccagggttgaaaggtttccacatgccattttttttttttttgaggaaaactgggttctttttgggcccccacagcccgggggggagaaagtggagatttttttggaggggtttattgggcacggggtgggttttttaaaggttcctttgcggaggttagggtggggcttgcacaagcatttcaggggtggttttttgtgattggagagccccccaaacagacccaagttttttcttggggcccttcccttttttggggctcgggcagaattttacaaagctgggtttttgtggggggcaaatggggggccggggccttcccaagttacgggtttttaagtgccatcaccacgcaaattcaagctagagccatctgtgagcttggtaaacgtgctagattgttgccctccccagctgacgggcgcggacctctactctctctgctctgatgctatgacagctgccctcaaacgcagggttcatgacctggaggaagggctggaacaaggtagctcagcactgatgctcaccatggaggacttgctgcaggctgccgcccggctgcaaccctcagtcagtgagcaggagctgctccggtacaagcgcatccagcgcaagtttgctgcctgctaggagccccccagggtctgggaccccgctcagcatggctgcaggtaccttgatagcccacagagagatctgggaaggaagggctcctcctcaggctgctgccaacccacctggaggccacctccctccaggagatcccagggtgcaaagtggcattgagacagcagcaacagctcaagagatatctcctgcctacttgcccctccttccaggccggctctaagagaaaggcccatctactcaggaagagggccagggccttgggttctggggattgggccctgagagggctagttctgtggctgaaaataaagcatgtcccgccccctaaaaaaaaaaaaaaaaaaaaaaaaaaaaaaaaaaaaaaaaaaaaaanctcgagactagttctct

SEQ ID NO: 8185 - DNA, 2864 bp, Homo sapiens; identical to SEQ ID NO: 5855

SEQ ID NO: 8186 - DNA, 1571 bp, Homo sapiens
gcggcgacgtgtgggaagagggtaacgaggtcatagaaacaatcgtagaagggagagggggtgcagagagagaggagtaatgatcatacatatatcattaaggcgtgcggtggtgcgcgatagcatggcgatgagtcacatagtcactagacggtcacaaacagagagatgtgcgcaaagcgaggtgaccggtgaagagaagaaagagcaaggatagagcgaatgcggcgagagatagatcgtgggggaaatgggtgtaatatggaggagaaggtgctagagacgctcggagctggagactgttgcgcgacaacataaagcggagataaagagatgcaaaaagtaagaaggaaggtgatcgtggaagggtgggtaaaaagcggtgatacagagctgaaaaacgcagcgacgatcgagtgccggctaatacgagaggcggcgcctatggtagcggggaaagagtcggggtgtgttacaagggacgcgtacactaccacagtggacaaggtggaatgagggggaaacaagaaagataagagggcacgtatgtgtggggtgagtacatcaatggggggtgtcatcgtaaacggcgcgacaaaaaatgaaactattggaagctaagggtcaggaatatgtagggagagggggaagcgaatagggaggcggataaaagaaagttgggctggggggcggagagcgagcacaggaaataatggggggggacacaaagcgaggtcagcattagaacacctgctgcgccaggagctcaccaagaagctgatgcccaactgcaagtgggtgtccagcctggcggtgcaccctgcaggtgacaacgtcatctgtgggagctacgatagcaagctggtgtggtttgacctggatctttccaccaagccatacaggatgctgagacaccacaagaaggctctgcgggctgtggccttccacccgcggtacccactctttgcgtcaggctcggacgacggcagtgtcatcgtctgccatggcatggtgtacaatgaccttctgcagaaccccttgctggtgcccgtcaaggtgctgaagggacacgtgctgacccgagatctgggagtgctggacgtcatcttccaccccacccagccgtgggtcttctcctcgggggcagacgggactgtccgcctcttcacctagctgttctgcctgcctggggctggggtggtcgtgctgaagtcaacagagcctttaccctgtgaaaaaaaaaaaaaaaaaaaaaaaataaaacaccaaaaacacacaaaagaagaacaaaaaaaacgagcgcaagaagcgaccagaaaagagaaacaaagtggaagcagaaacaatataaagaacgaacggacgaggagaaagagaatgacgaatgatgcaagggaggaagagagacaaggacacagatgagacgaagaaagacggagaagggagaggatcgagaggaggaagagacagacgaagagaggcagacagacaagagagaaaagagggagggacaaagacaggaccactaaaaaagagagaaggagacaagcgacggagacaaaagagacagc

SEQ ID NO: 8187 - DNA, 5372 bp, Homo sapiens
  misc_feature (3566)..(3625): n is a, c, g, or t
gggaaaaaaaaaaaaaactgtccaccaagaattctatacctaaatatcttttaagtgaaggtgacataaagatgtttccaaacacacaacagctgaactagttcattaccagcagaccttcactgaaagaaatgttacagatgctttaggctgaaggaaaacaaaaccatgtggaagtctggatctatacagaaaattgaagagtactggaaatggtaactacatggattcaacacaactgcaatcaaaatcccagcaggctattttgtagaaatcgagaagctgatcctgaaattcatatagaaatgcaaaggacctggaataattaaaacaacttcaacaatgaaaagcagagtttggggactcgcagtgcctgattgcagacccggtgcatttggactcactgtggcgtggggtcccagatgggaggaagcttcctgagaggtgacgcctgagttgagtctaagaggacaaggagtgcggcaccttcccgtctgatgctggcgttgtgcgtatggtgccctgacgtctgtccacgtgggcgcggaagcaaacagcgatgtcccagacgcaggactacgagtgcaggagccataatgtcgacctgccggagtcgaggattccagggtcgaacactcggttggagtgggtggagatcatcgaaccgcgcacccgcgagcgcatgtacgccaacctggtcaccggtgagtgcgtgtgggacccgccggccggcgtccgcatcaagcgcaccagcgagaaccagtggtgggagctgttcgaccccaacacgtcccgcttctactactacaatgccagcacgcagcgcacggtgtggcaccggccgcagggctgcgacatcatcccgctggccaagctgcagacgctgaagcagaacacggagtccccgcgcgcctcggcggagagcagccccgggcgcggcagcagcgtcagccgtgagggcagcaccagctcctccctggagcccgagcccgacactgagaaagcgcaggagttgccagcgagggccgggcggcccgcggcgtttgggacagtgaaggaggacagcggcagctcttcaccaccaggagtgttccttgagaaggactatgagatttaccgggattacagtgcggacggccagcttcttcactacaggacctcctcgctgcggtggaactcgggcgccaaagagcgcatgctcatcaaggtcgctgatcgggagcccagcttcctcgccgcccagggcaatggctacgccccagacggcccacctggggtccgctcccgcagaccctccggcagccagcactcacccagcctgcagaccttcgccccggaggctgacggcaccatcttcttcccagagaggaggccgtcacccttcctgaagagggccgagctcccagggagcagctccccgctgctggcccagccccgaaagccctccggggactcgcagccctcctccccgcgctatggctatgaacccccgctctacgaggagcccccagtggagtaccaggcccccatctacgatgagccccccatggacgtgcaattcgaggctggcgggggctaccaggccggctctccccagcggtcgccgggccgtaagccccggccgttcctccagcccaacaagcagggccccccctcgccctgccagcagctggtgctcaccaagcagaagtgtcccgagcgcttcctgagcctggagtacagtcccgccggcaaggagtacgtgcggcagctggtctacgtggagcaggcgggctccagccccaagctgcgcgccggcccgcggcacaagtacgcgcccaaccccggcggtggttcgtactccttgcagcccagcccctgcctgctgagggaccagcgcctgggcgtcaagtccggagactacagcaccatggagggacctgagctgcggcacagccagccgcccacgccgctgccacaggcccaggaggatgccatgtcctggtccagccagcaggacaccctgtcctccacaggctactccccgggcacgcgcaagcggaagagcagaaagccctctttgtgccaagccaccagcgccacccccactgagggccccggggacctgcttgtggagcagcccctggccgaggaacagcccccgtgcgggaccagcctcgcccccgtgaagcgagcggaaggtgaggccgaaggggcgcggggcgcggccgagcccttcctggcgcaggctcggctggcctgggaggcgcagcaggcccacttccacatgaagcagaggagcagctgggactcccagcaggacggctctggctacgagagcgacggcgccctgccactgcccatgcccgggccggtggtgcgggccttcagcgaggacgaggcgctggcccagcaggagaacaggcactggaggaggggcaccttcgagaagctaggcttcccccagatcctgctggagaagagcgtctccgtgcagaccaacctggcctcaccagagccctacctccacccctcacagtctgaggacctcgctgcctgtgcccagttcgagagcagccggcagagccgcagcggcgttcccagctccagctgcgtcttccccactttcacgctgcgcaagccctcctcggagacggacatcgagaactgggcctccaagcacttcaacaagcacacgcagggcctcttccggcggaaggtgtccatcgccaacatgctggcctggagcagcgagtccatcaagaagcccatgatcgtgacaagcgaccggcacgtgaagaaggaggcctgcgagctcttcaagctgatccagatgtacatgggtgaccggcgggccaaggccgacccactgcacgtggccctggaggtggccaccaagggctggagcgtgcagggcctgcgggacgagctctacatccagctgtgccggcagaccaccgagaacttccgcctggagagcctggcccgcggctgggagctcatggccatctgcctggcctttttcccgcccacccccaagttccactcctacctggaaggctacatctaccggcacatggacccggtcgagtgggtctaaaggggtggcgataagcacgtatgccaagtactgttaccacaagctacagaaggcagccctgaccggggccaagaaggggctgaagaagcccaacgtggaggagatccggcatgccaagaacgccgtgttcagcccgtccatgttcggcagcgcactgcaggaggtcatgggcatgcagagagagcgctaccccgagcgccagctgccctgggtgcagacacggctctctgaggaggtgctggcgctcaacggtgaccagacagagggcatcttcagggtccctggggacattgacgaggtgaatgccctgaagctgcaggtggaccagtggaaggtgcccacaggcctggaagacccccacgtccctgcgtccctgctgaagctgtggtaccgggagctggaggagcccctgatcccgcacgagttctacgagcagtgcatcgcgcactacgatagccccgaggcggcggtggccgtggtgcacgcnnnnnnnnnnnnnnnnnnnnnnnnnnnnnnnnnnnnnnnnnnnnnnnnnnnnnnnnnnnngcagccggccaacgtcgcggtcaccaagatggatgtcagcaacctggccatggtgatggcgcccaactgcttgcgctgccagtccgacgacccgcgcgtcatcttcgagaacacccgcaaggagatgtccttcctgcgggtgctcatccagcacctggacaccagcttcatggagggtgtgctgtagcgggggcgcccggggacaggagggatgtcctgccgcccccagccaggccgaactccgcactcgctctcccggcagaggggccagaatcgcccggcccagccctggagccccctccactcccccaggcccctggccccggcgctccccacgtcttctgcctggtctgagggtgcagccagggcacagcagcggcggggagggcgcctctggccccccacctcacggccagttcccgcgggcaccgcctcgccctccgctggccgcgggtcagctccgagaaagtgccttctgtgtcctggagccgagcgacgctgcctccttggggccgggctgcctccctgtggctcctgcgcgccctggcctgggccttgcccagccgccccggtctctccttccctttctcctgtcctcgtcctggcctgcagctcttcccagccccgagagagcttcccgacctgtccccgcctcctctccctccctcggcccgtggtccccagctggtgactgctcaggagtttgggggctccaggacagtgggcccggggcctggcaggctctcggtgggtggggtgggggcccccaaaccaaagtcctctggggtagggagcagggctgggcaggcattctgggggcagggtgggggaggggcgagagtatttttttcttcgtgtaactgtaaatccagaatctatcctgcatcgcagcccaccgtgtatagagatataaatagagggaaagatataagaactaaatttgctaatgacatagttttaacctaaatgctatttatctctgagccgtccccgtcctccgtgcagagcaagttgaggtcattccttcttttcttctccgatcttttttcttggcttctgaccaaaaaccaagctctaccccatccccatcccagacctgcaggagacgagcgagcgggaaggcgccgggcccgggactgtccgttctcggggccagagctgctgggggaccgagtttgtacattttccattttggaattttgagttccaattgttgtaaaacttaatttctccccagtttttatatatatattttttagagttccgtttttatttattaaaaacaaaagccccagccctgccgaggcctgggcggcgtcctcagtcgggtggtcccggggcctttgcggtcccgcccggctgagacgctcgccccgacgcatggacccgagaggcgacgacacgagtgaataaagtgcacatggaccctgaaaaaaaaaaaaaaaaacaaaaaaaaaaaaaaaaaaaaaaaaaaaaaaaaaaaaaaaaaaaaaaaaaaaaaaaaaaaaaaaaaaaaaaaaatttttttttccgggggcgaaagtttttcccctttaagggggggtaattttaattgggaaaggggggtctttttaaaacggcggggggggaaaaacccgggggttacccaatttaacccccttgaaaaaaaaccccctttcccaaaggggggaaaaaaaaaaaaggcccccaccgtttccccttcccaaaaatttcccaccctaaatgggaaagggaaccccccctt

SEQ ID NO: 8188 - DNA, 2932 bp, Homo sapiens
  misc_feature (2212)..(2243): n is a, c, g, or t
  misc_feature (2878)..(2879): n is a, c, g, or t
gtcgagagcggagagggcctgggaggaagtgggttttgcatacagtccctgttgactctagtgccccctgctggccccagacgcgagttccggcgaggcttcagggtacagctcccccgcagccagaagccgggcctgcagcgcctcagcaccgctccgggacaccccacccgcttcccaggcgtgacctgtcaacagcaacttcgcggtgtggtgaactctctgaggaaaaacgtaagttcgagccctgattcctccgcttccccgcagggtgaccttgggcttgtgcccccagcaccacccctgtcccgggtccctgttttctctctggaaatgggttgaagaccaaagaaaataatgtgcgccacttgggtcaccccgggccgcctgccccggaaaattggccccagttgaggagttgtggctgtaaggatgccttgaaccgaggcggcggtgctcgtggttggagctctccagggtgggtgcgcatttgtaatgcggtggatgctctgggactcggcccctctgaaggtgctgggggttggggacggcccaggcagtggcgtaggcgtcctaggaaggcgggagcagaggcagaaatgtcgctgcaagaccgtagtcagggtccttgaccacaggggtcacttgtgaccaaccacatggtctgttgttcctcctgccccctggttcagcccaggaaacactggtgctcaggtttggagccagagatttgcactgaaagggcgggattgagtcgccagttgtcagtttcctcagcagtatttgcggaggttttcacaggaggccgttgcttcgtaaatattatacatgtattcttctttttggagcattttgattattactctcagacgtgcgtggcaacaagtgactgagacctagaaatccaagcgttggaggtcctgaggccagcctaagtcgcttcaaaatggaacgaaggcgtttgtggggttccattcagagccgatacatcagcatgagtgtgtggacaagcccacggagacttgtggagctggcagggcagagcctgctgaaggatgaggccctggccattgccgccctggagttgctgcccagggagctcttcccgccactcttcatggcagcctttgacgggagacacagccagaccctgaaggcaatggtgcaggcctggcccttcacctgcctccctctgggagtgctgatgaagggacaacatcttcacctggagaccttcaaagctgtgcttgatggacttgatgtgctccttgcccaggaggttcgccccaggaggtggaaacttcaagtgctggatttacggaagaactctcatcaggacttctggactgtatggtctggaaacagggccagtctgtactcatttccagagccagaagcagctcagcccatgacaaagaagcgaaaagtagatggtttgagcacagaggcagagcagcccttcattccagtagaggtgctcgtagacctgttcctcaaggaaggtgcctgtgatgaattgttctcctacctcattgagaaagtgaagcgaaagaaaaatgtactacgcctgtgctgtaagaagctgaagatttttgcaatgcccatgcaggatatcaagatgatcctgaaaatggtgcagctggactctattgaagatttggaagtgacttgtacctggaagctacccaccttggcgaaattttctccttacctgggccagatgattaatctgcgtagactcctcctctcccacatccatgcatcttcctacatttccccggagaaggaagagcagtatatcgcccagttcacctctcagttcctcagtctgcagtgcctgcaggctctctatgtggactctttatttttccttagaggccgcctggatcagttgctcaggcacgtgatgaaccccttggaaaccctctcaataactaactgccggctttcggaaggggatgtgatgcatctgtcccagagtcccagcgtcagtcagctaagtgtcctgagtctaagtggggtcatgctgaccgatgtaagtcccgagcccctccaagctctgctggagagagcctctgccaccctccaggacctggtctttgatgagtgtgggatcacggatgatcagctccttgccctcctgccttccctgagccactgctcccagcttacgaccttaagcttctacgggaattccatctccatatctgcnnnnnnnnnnnnnnnnnnnnnnnnnnnnnnnnggactgagcaatctgacccacgtgctgtatcatgtccccctggaaagttatgaggacatcgatggtaccctccacctggagaggcttgcctatctgcatgccaggctcagggagttgctgtgtgagttggggcggcccagcatggtctggcttagtgccaacccctgtcctcactgtggggacagaaccttctatgacccggagcccatcctgtgcccctgtttcatgcctaactagctgggtgcacatatcaaatgcttcattctgcatacttggacactaaagccaggatgtgcatgcatcttgaagcaacaaagcagccacagtttcagacaaatgttcagtgtgagtgaggaaaacatgttcagtgaggaaaaaacattcagacaaatgttcagtgaggaaaaaaaggggaagttggggataggcagatgttgacttgaggagttaatgtgatctttggggagatacatcttatagagttagaaatagaatctgaatttctaaagggagattctggcttgggaagtacatgtaggagttaatccctgtgtagactgttgtaaagaaactgttgaaaataaagagaagcaatgtgaagcaaaaaaaaaaaaaaaaaaatcccccaataatannatagggccgggccgcctccaaaaagatcccctccaaggggcccccaagcttac

SEQ ID NO: 8189 - DNA, 12253 bp, Homo sapiens
ggaggaggggcgggtgggatttctttatgtatttctgacgtctgggattgtgtcgtctatcgtgtgtgggataaatgaaaatatgctgttaatatggagggcgcatgcagagacaccgttcacttgtcgggagtagttgtttgtgcgatacgaaaagctggtagtgtgtggtataatcgcgctggtgggtgttttgtgttttttgttgggtggtggggtgtggatggattcaggacgtcgatgaattggagaggaagacagagagagctttttttgtgggtggaactattgtgagttacagcgagttgatgtggatagtacatatgtttcgatggaggctggtcgtacggtctcacatattatgtatgggtgtgtgtgtagagaggagaactgatcggaggagagggggcgcgggtcgagcgcgaaacacactgtgttgtgtgtgttgtggatgtgtgttgcgtagttagtcttctcgtgtgcgtggtgtctggtggtggtttgttgttttgttttttttttgtttgttttgtatgtgttgttttttctttttttttttttttttttatgcatttttatttccttttaatctctttgtcttctattatctctatctgtacagctttgtcaccatttttttttattttctcacttgaagtagttccagaaaaaaacacaaaacctcaaaactgttaacttgaccttataatttcctttctctttctttctttctttctttttctttctttcacacaggtaagacctataacaacaaattgacaattacaaccaagttaaatcgaacctggaagggaggtagctgaaatctgtctcaaagaattattttcaacaaatagtatttaagcattggccaggatgggaataagaccaagagaaccgtctaggcagtgactcaatgtgttgaagccaggagtggcagctgataccctgcattttcaaagccctaccatctatgacaatctttcccttccttaacaccccaattcaccatcaaaactcatttcccaaggactgtatttccttaaaaggttgttggcacagaatctgggggtaatgcaaatcctttgggtaggtagttaagattgtggcttggaaaagcttccctaaatagggcttagaggactgtccacctcatctttcatattttgctgctaacaatctaatacttcagatgcagaaccttcagtgttttagggcctttgagctgctgacacacaatagtgcatcagagctgcctctcagtgctccggtcacctacacagaagatgactgaaggaatgaaatgacgagttaattcccaggaagaaaatgaaactgggaacaaatgcattgcccaaattgagctgaccctcctccactaaggtttgaaaagaccctattaaagataccttccatgtgggcacgaggttggccaccaatcaagtagcctcttttgcctaatatccgtggcacaatataaatttgttagcaacaggtctgaatgaaagagactgggtgggtcttgattcagaagagctgaattcactctgtgagtctgaagatacaagtcagcctccaggaatctttgcttagctggatagtgtgaaaatagatgatgatgggagtgaagatagaaagaggataaggactgatttgagggaagctggtaaggttcttctgtggctcctgaaatcacatcattagtaatgtcatctttgggtcttcagagctttttgtattacctatgggtataattaagcaactgggagggttgatactgttacatttcttagctcgtaccttctaaggtagttaacaccacacaggctgataactcagggcaagagagaggcctggagagttgacaagagtgtgaagatactggagaggggttcaaaataggatcaattcttctaatactattcttatttcttgctaataatttgtccttgtaattatagtgaagtaatggtctggatataaatgagatatggttttgtgaggaagaaacatagaggattattcttaacaactgtggcagccttgccaatatggaacccaatttcagagtttgtgaaatggtacaagtctcataaactatcttcagcactgcatccgtatttgtgcacctgtgccaaaagcaccttgatatgtttcttagtgtaattggccagagatggccaatagatgtcttctcaagtgtttttgatcaccaggtcagtgctattgggagtgatataatatggtggttcctaaggttatttttggtctctttttttttttttttttttaagtgctatgatagattaacaacacctgccttggatgcaggaattaggtggggctgcacacgtgcatggtattttctatccctatgctaggttttgtttctgttggctgtcttcactagacttgagatgacttgatttacagtaatccctatgtgatgtaactagtctagaccttcccttctccgcaattcccagctccaggtttcagaaagtatgccacactcaacccttctctccagttcatcctgtattaatttcttcccatattaattcaaagggagtggacaggtccctggctgaaaagaaataaagagatccccaaagtggtgggggcttccacgtgcagttgactaattttcacttaacttttggaggctagacatgggagagagaaaagcactgcccagtcacaggtatggaagggagtactgctagctggaaaaaccatatagaaaacatgatgaccatgttgagttgttggtgctgaggctgtgaactctttggcttccttctgatggccctcttgagaacaatctgtactgttcttataaaagattctttctcccagaattatatctcctcagagtatcagcaaggttctcaggatcgaagcctactctagcctgaagggctaggaagattaggataaggataaggataataatccaaaagtctcgacaattccagtagtctctggatggctccaacatcatagaaatttaacactgttccacttgtttacaaaatctaacactggcttagacattctggactttcagtgagggttccagcatctgatgtccctcaactcctttccagggtgagaggcccacttacaggaaacttaacttctcaccatgtggacccatgagggtttttctcttgcagaagggctaaaaagtgaggagctatggaaaaatgtgggtcacttttaaggcagactgtttggttgtgtggaatttttcctaacctagttctaccatcttggattattcaatgtataggatagagcagcaggaaaagtagcagcaaatgtggtcccaaggcaagatctgggggaacaggtaagtcctagagggatattatgacctcaagcctcaagcaaggggctgatataataccttgacattgcaatcctaagccattctcagattggcctcgaaccctggagttggggtaaaatcccccatggcagcagaagaattggggcgctttgcatacctgataatctttacctcttcctaggtcctagttccctagaaggtaggggatcacagactgtttcacttccaatcccaaaggactgcacaattgtgcatgtcctacatattctgagcctcagagtgtgaactagcttgacatctccacacttggtcttagcagtttctgcaaatttctttctcccaaggatagtgttggctaggagcttgggaaagaaaagattgagtttattccggtctctctctgctcatctccagaactgccctcacacagatgtttgtatgggtgtgtatgcatgcatgtgtactaaacacagatgggcacactctagatatagaacacgtttttttgctgtggttgtgtgacaaatggctagaattttaggaggctctgggactgcacactgtatatgcaatccatctcagactttgggatgggaatccatttcatcatccagcatggcgaaacttggttcattcgccccaatgtgagtccttcctgggtaaaattaaaggcagaccggttgggtgctaaggatccctggtgtggagaggccattccgttgagcagctgactgtgaaatcaataccaaagggatgtgggtcctggcgttgggaattctttgacaacttcttgtccttccttagccatggctgtatccccggaggtctttccggctgtgttcttgggcctgggggtcccgacaagcacagtcaccttgtaggtcacaggacatagggaatggggtgacctttttggtcttcactgtggaggtgcagcaatccccaccgtcatagttgcaaaaggctcggttgttgatggcatcacaataattgtctcccatgaagggctcacagcctttgacacagtgaatcagagcagggtgaggataccacttgagaccagcagtgcagacaactctctctacccgtgtggggttcagccagtgggggatgtcacgcacggtcacgttcattggcaggatgatggactcgctgttgtggtccaggcacgaggtggcacactccgaccctatggcatagccatcagggcactgcagtttgaggttgctgttgagctcgtttggaaccgagcactggccttgcatctcctggcagacatggaaggagccgttccaggtgccatctttccggcaatgaatgacattgctcccaagtccctgggaggcatcactgtcttcacacttgatcctacactcactgttgaactggaagccattagtacactggtagagcccatggaattttggtggaggtgggtcacaggtcacaggaacacaagctccctcctgccagctgccatcctgggtacactgagtcttgaaggcccgtttctttgacttccgagaggatccaggcacatggtatccaggcttgcatttgtatttgcagaaggagcccaccttgtgcttattctctcggcaccgggcggtctggaggtctgcattgggcacagggggtggagcgaggcacatgagctcacacagggcctctgggaaggaccacagcccatcctccatgcaggtcaggaggctgttgttgcctttcaattgtgcagggtgacggcactggaaggaacattgactgccaaaggtggtgccctcagggcaggagaaggaggcagcatagacttgatggtgatctgggatgctgcagtcgactggctcacaggccacctgcttattccacttgccctctgtacaggtcactgtgacgctgggtcccgtctggctcttgatcagctcatcatcccgccgtatctggagcacgtagcctgtccggcagctcacagtacactgggcaccgtggtagcggtcgctgctggagcaattgagagaagcattctccacagccagctctggacagtcagttttctcacatgcgaagtgcacgcagctctgctcggcagggctgtaggtctcccctctctggcagctgctcagggtgacggggtcaaagttgtcgaaggaacggagggccacccccgagatggcgaccaggggcgaactgaagctcacacgtaccgcctggctgtggtagaagggctggctgaggtcatggaccacagggataatcaggggattgttcctgcagctcaggacatggaggcctagatcgtggctctgatctttggtatcaagcagctgcacgctgatggtctcctgcttttggtccccataatatgtcccatccgtcaccaggtggacaatgacagctgcggcaaccattggttgagaaaaatacgcccggagccaaaaagtggtctgagccagctgggaatatgggtagctgatggtgcaagggtaccaggcatgctgggaaatgccttcactgagatctatcaccttggttcgacacacctgggatgctgctggctgtccgatgatgacccagcctgggcattgctggtcttgatgagatactgaagcattggatgcccactgatccaggaatccctggggcgtgtagacaccacagtccttaatgctggttttttgttcaaactcctcacataccccatcaccatcatggaaatagcaccggctgggttcatcaatacaattgaaggagacttcttgtcggcagaaaagggagcagccatcaccattgatcttattcatgtcgtcgcattgttcaccttggtctttttgtataatgccatcgccacagtacccacgtccatggatgtatgtgacagcaggtgatggctcactctcttcagttcctgaaatagttatgacccaatactggtacacactgccaagatttagatccatgtctacgaatttcctattgagatgtaggatggaggccacatccatctggagaggagggtcccggaccaccttatacttcaggggcttacactgtagacagagtggggtgtctgcagtggaggtcaacatggcagcatcgatctccaggtgctcatccagcgtgtagatttggatgccatacacctcctcgcccacgtcccagagtctgatggtcagtgggacatcacagaagacattctgaggacccagggagatgttcttcccactgacagccaacagtttgatgtcattgacagctccactagagtcccagtcagtggagacaaaggtcacccaaatggtcagagactcagggaccaaggggtagaggaactccagctcgaggtagcagccttgaggctcagggcaggctggaggaaccgtgtgtgggttgacagctgaatttgggctccaggtgcggacactggacttacagggctgttcaacatcaggatgaccttctgcttcacgagggctccagtgtcctgatgggctgcagggcattggggaggaagcgttggaagcatactgcaccaggattctcccttccaggcaaagatgacatgctgatcccaattctctttcaaagaaatggccatctataggtgggaaccactccagtgtcacagagtccgttgtgtggcccagaacttggggggcgagggcaacaggcgctggtttcctggagggctgccagccctggtagaccaggtccaggtaacagtgcattctggcgacttgattgggcgtgaaggagtccgtacagtcgtcatctgcatagctcatgaagttgttgtaaggagtgttgaagaagctatgaaagccacaggtgtcatttcctggccctgggtcaccacaggacttgtgtttaggggctgggttggtatcattgcagaggtctccagtctcgaaggagggctctgtctccatgcaggggtcactgcaggactggatttctgagatgcctcggaagacgtgatagaggcccaggctgtgaccaatctcatggatcatggtgtgggtgtgcccaggcatgccatagaaagatgggttcaagacaatgccacctaagtgcatcagggcctccttgtcccatggccaagttgctactcctgccaactcctcctctgaggattttgcaaagaaaatattgagatgtgttgatccatccaatttaagaatgttcttcagctcattaacatccaagtaggctctgtgtggagagtcggggtcaaagcaagtctgagtgacattggtgatttcagggtcacagcactctccaccatcaaagttgaaccgttcatagttgcagtccatgtcacacaccccgttgtgctgcttcttcacgaaggcagggtggcgcaggtggcggcaatccccgccgtcgtggcccgtcagcgtgtggttgcactcggggtcacagttctcatccccaatcttgctgatgtcacagttggccaggatgaggcggcggcgaagggaggagttgctcacctccagcacgtccagctcccaggagatgttgtattgcttgaaggcctcagccagctgatggtgctggaagtccacctgctcgcgcgtcaccgtcgggttcttatgatcatcttcatagaggttgaccacgcggtagcgcaccaccttgggctggcggaaacttgagagctgattgtagctggcaatgacctctgtgttgtcacacaatgtctgtccgcacagaggaggctccagactcgtgtccagcagaaagccgtgggcattgctgaattccactttggggctgctgccatccttcatgggggaccaggcatgcttcacattgtcccagttctcctggaggaggagctgaggtagagcagtgtgggcgccatgggtttccatgtcagacagtatctcccgctgagtcctggccaccttccacagactgaagtgctcgatgtagccccggtagttgtgattcagggcactgccccctaacatgagcactttgcacttctgggtcagtgggctgaatatgccacccacttgttccccagaggtggccacctgggcaccattcacatagagcttcatgaactgcccatcataggtggcagctaggtatacccactggcctgggaggtagctgcggtgggcattgatggtggtcacttgccgggctcggtctgtcttcaaggagaaaaagtagcgtgggtctttgttgtcttggtcactgatggtgtgaatgcccacgacccatcctcggtcacgtgagatataagaacatttgtcatacagccctgtgatcactgccggagacctctggcccccctccgctcgcagccacacttgcagcgtgaacgcgtcccggggcagctcgaggtcggcccggaggactcgcagctgctcgcctcgcccgctgaaatagagcgcccggctcggcgggctcggctcctcggtggcgcccctcgcctcccgctgctgccgccgccgggggacgcgcacggcttcccaggcacgcccggcggcggcggcggcggcggcgaggcgcggcggccgcgggccgcgggtggcgcaggtggccgggccggcggcggggcgcgggggtcggccggcccgcgggtctctccgggcccggcggggacgctcggccagcccgcagcccagcgcggcgctcagcagccccaggtgcagcacccaactccagagccgcatgtccgacgttccccccgccccccccttcgcccctgcaccgccacccggagctgccagctttgggagcctcggcgcctcgactttcttcgcttcttcacccttcttgggcgagccccccttcacttgcttttttcttttctttctcgctttcctcctcaaggtgtgtgctccactctccccacctttgaaaaatacagcccaactcctcctggttggcaattaatttctctccccgctcctttatctgccttattttccccctaacagctggttgccttcctccttgttttatttcattttattttatatgatttctcgctccaaaaaaaagctcctcttaagactgatccgctgaattccctccccctggaatttttgttttgtttttggaaataatatttttttaaaagttgccttattgtggagcgggaatctgaaatacccaaatgcctgttttcctcggtggagtcaacccgaagagctcccaccttctctggatgtgcctgggcttggactggctagaatctttctctggactgttgcatgtacagtgcctccatcctggaggcaagagagttgggagtggctcgaatcagagccgtgcccaagatatccctgctgttgcatcgtttgaagctgacgtcctgtgtctgtacactgctgccactgttgtgtcctcgctctgcttgctgttgcctcacgccaggccccgtcctgccgtgacacccttcatcctacccttggaaccccaaggccaagttggttcaaactgttggagaacagagttggcctgcatctggaacacacttgtcctcagcttaccatctcctcacaccccagagtggaaaggtgaacacctgcagctgaggcttggaaacgtttcttgtgttgccctgaaaaatctttgagacctcagggaggctctgtctctcttaaaaggtggagaaagatgccattctctccctaaggtctggtggagtctccccatcttgcatacccttctgcaagccatctatctctgctcactctccaattgacccgcctgggaacaagggatgaggaggagttgggggctggggggaatcctgccagttggtgaagccctgtggcaggaaggtatatgtggacatagagtatacctgattctctttcttcagccactgactgcttgggttgggctgtgaatgataatggaatggctggagtctgctgttgtcagaaggcagggagggtgatgaaggactgacccacatggactgggatgtgtgtcggttatgggcatgactgcacgttcactctcagtgggatctgggcaacatggagttcattgtcctgttgcttgcttacttatttctggcaggaatcagggtggcaataggactagcagcaccctggggtgctttgcctaccatgagttaacgctaaagaacttggctcaaatcctagaatccttagccaccaacggagatcaggcattaaagagaattcaagagttccccagactctggaaaatgtagttgttgataacagactagcattggattatttactagctgaacaaggtggggtcttgtgcagttattaataaaacctgctgcacatatattaactctggacaggttgaggttaacattcaaaagatctatgagcaagctacctagttacatagatataaccagggcactgccccaactatatctggtcaaccatcaaaagtgccttcccaagtctcacctgtttttcacctcttctaggacctttgacaactgtcttgttacaaatgtttggtccttgcttctttaacctcttagtaaagtttgtgtattctagattaccacagttccagagacaatgctggcacaaggcttccagcccatcctgtccactgacacggagaatgaaatcgtcctgcctctgggctccttagatcaggtatccagaaatttttacgtcctccagtgccaggcagggcctacgtgccataaactcagcaggaagtagttacggaaaagcaggactccgcccttctcgaggcccccttaagattaaggaggagtatctaatctctgaagggggaatgaggtaggaggtgggactcaactctggaagtggggctcaggcactcagaccaaactgagcactagctaaaataggtccagggcagatgctagtttccataggacacaccgacctgtgtcaagtcagttcacgatggctctggcagcacccagaagttaccaccctcaccctggaaatgtctgcataaactgccccttcatttgcatataattaaaagtggatacaaataccactgcagaactgcctctgagctgctactgtgggcgcacagcctgtagggcagccctgctttgcaaggagcagcgcctctgctgctgctgtgcacagccggccgcttcaataaaagttgctaacaccactggcttgccttgagttccttcctgggcaaagctaagaaccctcccgggctatgcttcaatcttagggctcgcgtgtcctgcatcactgggatcatctcccagtaaactagccacacttacatccatgtgtcagggacatttctggagaaagcagcccaggacactgttgaataaaacacacaatagtctctgtggtcttctccaccccaccccacaccaggcaccctcagcttgattctcctttttaattgcctgtaagcagggaagcacaatgttttcacattctttgtaaggcctttgttctactaaaatctaacctcagagcacaattttaaactagatgaaagagttgctgcgcctgaagcactgcaaacacctcctcaccacacatgtgcactcaaccctggacaccctcactcaccctgacaccctcactcctcaccctggacaccctcactcaccccagacaccgtcactcctcaccctggacacctcactctgcaccctggacaccctcacacaccctggacacgttcactcaccctgacaccctcactcaccctggacaccctcactcaccctggataccctcactcctcaccctggacaccctcactcaccctggataccctcactcctcaccctggacactctcactcaccctgacaccctcaatcctcaccctggactccctcactcctcaccctggactccctcactcctcaccctggacaccctcattcctcatcctggacaccctcactcaacctggacag

SEQ ID NO: 8190 - DNA, 1528 bp, Homo sapiens
tctgggcttacaagacccaggggcacgtcagctccttagatgggctcagcctgacacataattcttaagcctttcctgtttaagaaacttctagaggctgtgtactctcaccaatcctcttcgagaatttgttcatgtgtatttccccattatatggatgaggctcaggataacagcatagtggctaccttctactgagttttgaggtgctaataagtatgtttgtctgaggctgcacatgtgggtggctctgtgtgtatgatccaagggacaaaatgacgatgtaggaaccagcaagaacggaatctgggctgatgcttcagtctccacctgggtgatggctagcctcccgccctccaccaccgcatcccacacgtgctgcgcactgtccccgtgtctcctggagaaccaaactggagaaaacctttctgagtatctctcatagtaccccttccttaagaagatgtggtttagagcatgtgtgcaatcctgcctctgtaattaggaaacggagcccgaggctttccattgttggttgaacccaggacagctggtgctattcacaggctgaagaactgggcagttcttacttgggtctgtcctaggatgtggaggaagttcaggactaacgctaggcagagagtatgactcggtttacccagcctaggggcctctggatgggaacactccattccaagatctcagcagagcagggcttcctggcttgaggctggaagcctttgggaagaggcccagctgggacattccctgggcacctgtcttccgctgaagggagcaaggtgccctctgggactgacagccatgaccctctgtgccatcctcaatccttgagccatatatcaagagtcctctagagctggatggtcctcaaaagtctgtccaaggaatgccaacgttcaccgggctctgagaaacgacgcaaatctctgagctggggaccacttggagaaccggcttagtaacagtcctgatcttcgcaagccagcttcttctgcatctgaggggctcctggcgcccagaggaggcagacagatgtcttctagctgagtttctaaccgcatgatgagactcagaccttccgctgcactagaaaatctgcaacagtgtccctgagtcacttctccttagtgggcagactcgtgttagatttgtggaacccagctctctgatttactccttttggaaaacccatggaatttcatgtataaggctttcatttgtattttaaggtttttctgtttgttttgagtatatacatggtgctcaatagcaacattttggcagatgaagcagtttatgattccactccctcctgtatgacaggtagccactatactgaatcaaggtgctgaactcaaatcacaaaattctggcttaccgatacaacaaccaatacatctttgttctgtaatgtaaaatttgactccttacttttataacttattaaagttaaaatgtctgtgtttttgcaaatcaaaaaaaaaaaaaaaaaaaaaaaaaaaaaaaa

SEQ ID NO: 8191 - DNA, 2062 bp, Homo sapiens; identical to SEQ ID NO: 6696
  misc_feature (50)..(50): n is a, c, g, or t

SEQ ID NO: 8192 - DNA, 3684 bp, Homo sapiens
  misc_feature (1175)..(1185): n is a, c, g, or t
  misc_feature (1358)..(1382): n is a, c, g, or t
ttttttttttttttttttttttttttttttttttttttttttttatcataaaaacctttttatatcagctcacccacacctccctccgttcctccctgccctttctcgccctggtgatcatcagggatgctggagtctggcgcccccccacaccaccagagctgaagccgacattcaaggtggacgtggcgcgtggagagcaagggaaggcccagctcctctccttcgtccccactctctgtgggctcaggaaacacacgctgaccggaggcagtggccaggagaggcaggctagggtgcaggctcacgccattggtgcagtccttctggggcagaaaactcaacacgggctccggcttcccatcattgccaggcccgtccgtgtcccacacagagacagccccgctcgtgctgccactcactaggaactgcccggtcgggtccagatcgaagtagatgcgctgattggtggtcacctctcgacccagggaccacagtgggtaaccagactgccggagatcccagcacaggagctcagcatccttgcgggctcctgagaagaagcggttgccatcgggatgaaagcagaggtgggtgatgcccccttggtgccctcccagcaaggcgagaggggagccatcatcccaggcatacagacccagggagcggccgtaggagccacaggcatagaggggctgggctgggctgaaggctatgcaggagatgatgccgctctggccctgcttttttgcaaatgtggctcggacctcgcagtctcggccaggccgggccgtggaaaaaacacgcacagtccggttgaagccacagaagagctgggagccatccggggagaagcagagcgaatgggctgccgtcagctcatccaggtggttgtaggcgcgaaaggaagcccggagctctccagtgaatgcgtcccagatatgaatcgggttctcccggctgctgctggccacgtaggaggtgtctggctgggctgaggacatcagagaataccagcagtaatcatagatggtatcaccttccaccattcgaaggacagggaccatttctgcatattccacctgctccccctcatggtacagctctgggggcaggttataaattcgcaagaggaaatcagcactattgtccctcgctactgagcgccacccagnnnnnnnnnnncagcctttcaagaagttctcaggttgggtgctgaactctgaccaggaaccactgagaaatcgaggcagctgggagaagctgtagttccaagcggtgtctccctcgtcctctgcagcgggttccccagaggtatcttccatggcttttccagaccccaactctggcccgttcgnnnnnnnnnnnnnnnnnnnnnnnnncccgtttgcttcttctgcaggaaggcttgtattttcagaaagttcttgctcctcgattcgaggactcaactcactaggggaaccaaactctgtttccaggggagtggagagagaaactgggtccccctcccgtagctcctgggacacagctgagccagccacaggatctggggacaaccggggcggatcccccctttcgggaggcggtggcatcagttcagagtccgcatttttattcatcggggaagcgtggggagaaggatgggctggaactgggtcctggtctgaaggacagcagtccggagctaacggttgagtctccaaagtcttcatactgcagaggaagcacagcggagattagcctcagccaggatggcttcgaagttctcagggatccgacgcagagctaaagaaacccacctgtgcttccctcctcttctgggagtaggcagaagactcccgggaggagaggcgaacagcggacgccaattcttttgaaagcactgtgttccttagcaccgcgggtcgctacgggcctcttgctgtcgcgggatttcggtccaccttccgattgggccgccgcatcccggatcagatttcgcgggcgacccacggaacccgcggagccgggacgtgaaaggttagaaggtttcccgttcccatcaagccctagggctcctcgtggctgctgggagttgtagtctgaacgcttctatcttggcgagaagcgcctacgctccccctaccgagtcccgcggtaattcttaaagcacctgcaccgcccccccgccgcctgcagagggcgcagcaggtcttgcacctcttctgcatctcattctccaggcttcagacctgtctccctcattcaaaaaatatttattatcgagctcttacttgctacccagcactgatataggcactcaggaatacaacaatgaataagatagtagaaaaattctatatcctcataaggcttacgtttccatgtactgaaagcaatgaacaaataaatcttatcagagtgataagggttgtgaaggagattaaataagatggtgtgatataaagtatctgggagaaaacgttagggtgtgatattacggaaagccttcctaaaaaatgacattttaactgatgagaagaaaggatccagctgagagcaaacgcaaaagctttcttccttccacccttcatatttgacacaatgcaggattcctccaaaatgatttccaccaattctgccctcacagctctggcttgcagaattttccaccccaaaatgttagtatctacggcaccaggtcggcgagaatcctgactctgcaccctcctccccaactccatttcctttgcttcctccggcaggcggattacttgcccttacttgtcatggcgactgtccagctttgtgccaggagcctcgcaggggttgatgggattggggttttcccctcccatgtgctcaagactggcgctaaaagttttgagcttctcaaaagtctagagccaccgtccagggagcaggtagctgctgggctccggggacactttgcgttcgggctgggagcgtgctttccacgacggtgacacgcttccctggattgggtaagctcctgactgaacttgatgagtcctctctgagtcacgggctctcggctccgtgtattttcagctcgggaaaatcgctggggctgggggtggggcagtggggacttagcgagtttgggggtgagtgggatggaagcttggctagagggatcatcataggagttgcattgttgggagacctgggtgtagatgatggggatgttaggaccatccgaactcaaagttgaacgcctaggcagaggagtggagctttggggaaccttgagccggcctaaagcgtacttctttgcacatccacccggtgctgggcgtagggaatccttgaaataaaagatgcacaaagcattgaggtctgagacttttggatctcgaaacattgagaactcatagctgtatattttagagcccatggcatcctagtgaaaactggggctccattccgaaatgatcatttgggggtgatccggggagcccaagctgctaaggtcccacaacttccggacctttgtccttcctggagcgatctttccaggcagcccccggctccgctagatggagaaaatccaattgaaggctgtcagtcgtggaagtgagaagtgctaaaccaggggtttgcccgccaggccgaggaggaccgtcgcaatctgagaggcccggcagccctgttattgtttggctccacatttacatttct

SEQ ID NO: 8193 - DNA, 3121 bp, Homo sapiens
  misc_feature (3096)..(3114): n is a, c, g, or t
ggttcttttccaaacttgttccctggcttccaagtgacgaaaccagctgtaatttgagagcggagagatcctcaggatatctttagccaaaggaaaagctccgcattcccacccagtccagaaattgaaatactatcagggggcaagagcctttctctccagctacacactccatctcccgggagcaaggggaaactccgagaggagggcaacagagccagcatcttgccaggccccggaggaggggttccccgctacgcctgtgccggaggagttccagtcaccgagcgaggggcgcaagggtgggtgcatcctgcgctgcggcgggcgcgctacccagacgctggtgtgcagagccacatgaagcctgctggggactgggggccagggagcagcaagccagctgggactgaggcggacgctgtctcagggagacgctgactcgcaaagacactcccttccttgtgcctgggtaataagtctcctcctggggtccctggccatcctgaatatccagaatggtgtttctgaagttcttctgcatgagtttcttctgccacctgtgtcaaggctacttcgatggccccctctacccagagatgtccaatgggactctgcaccactacttcgtgcccgatggggactatgaggagaacgatgaccccgagaagtgccagctgctcttcagggtgagtgaccacaggcgctgctcccagggggaggggagccaggttggcagcctgctgagcctcaccctgcgggaggagttcaccgtgctgggccgccaggtggaggatgctgggcgcgtgctggagggcatcagcaaaagcatctcctacgacctagacggggaagagagctatggcaagtacctgcggcgggagtcccaccagatcggggatgcctactccaactcggacaaatccctcactgagctggagagcaagttcaagcagggccaggaacaggacagccggcaggagagcaggctcaacgaggactttctgggaatgctggtccacaccaggtccctgctgaaggagacactggacatctctgtggggctcagggacaaatacgagctgctggccctcaccattaggagccatgggacccgactagtcggtgaaaaatgattatcttaaagtataggtggaaggatacaaatgctagaaagagggaatcaaatcagccccgttttggagggtgggggacagaagatggggctacatttcccccatacctactatttttttatatcccgatttgcactttgagaatacatctaaggtcatctttcaaaagagaaaaattggacacttgagtgactttgtttttagttttgtttttgtacattatttatgtgattgttatggaattgtcacctggaaagaacaattttaagcaatgtcatttctagatgggtttctaattctgcagagacacccgtttcagccacatctaaaagagcacagtttatgtggtgcggaattaaacttccccatcctgcagattatgtggaaatacccaaagataatagtgcatagctcctttcagcctctagccttcactcctgggctccaaaagctatcccagttgcctgtttttcaaatgaggttcaaggtgctgctttgcatgcctgccaacccatggaagttgtttcttacttcttttctctcttatttattaaccatggtctgagagttgtttttgttctatgtaacagtattgccacaaaactataggcaaatcgtgtttgcagggagatttctgatgcctctgtgggtgtgtgtaagttaaagtggccacatttaagaaggccaagctttgtagtggttgcacagtcacactgatatgctgatttgctctttctcattgtatgtctatgctttgtcatcagtgctatagtaaattacaaagaaataggtagattgtatgaacatacccacaaatgcctatgatttaggttaccaatgtattctttctcatttggggttttgcttctgtctgtctgtttattggaaacttgtacttcaagtagggggaatcctaattctaataactccttagctaagttttattattcaggcaataaacatgttttcatgtaaaaaaaaaaaaaaaaaaaatttacatctgtaactttcatatttctaaaaggggccaatgcaaaaggagagagaaggactggatttaagccagtttacttagagtatatgataaagaaggcagaggaatagctacatatttggcaattctcctctctgtagtcaccctgacatcctcacaagaaaacaaatctagccattgcccaaactttaaatttgatctctataggtctgcttaaagactcaaattttctccagtttctctcataaattcaattgcaaaagtttctgacaaggctcataccctgtacccttatgcagagcaagcattccatcctaagttataaactacagtgatgtttaattttgaagccaggtctacattatttaattaatggcttcaaaaggtggagatgcactttatttaatgtctttccctagctaattcttactctcaccttaaatatgctttcttgttgcatatatgcacagatacacacacacacacacacgaaaataaataaatgttcatattcttctgttcaacagacatttattttctcctctcccttgaataagaaaataagttttccattcctatgaactgtctaatatctttctattacagaaggggaaactgaggctgggaaaggctaaatgacttatcctccatcagttataacagcccctggtcttcttaaatttaaacacgggacttcccgaactaatttttttaaggatactgaaaaatgagagagagtggtcgaatgcctgaaattttgcttaacttactgtacttaaaatcaattataacttctttttgttactcagggccccactttttgttgctttctagacttgtgtgtagaaagaagattaatgatcacttaaagtagtttccttctttattctgaaaaaaatgaggaaaaaataacaacagtggcaaataaaatcatatttggtactaaaaaaaaaaaaaaaaaagaannnnnnnnnnnnnnnnnnnctcgagg

SEQ ID NO: 8194 - DNA, 2979 bp, Homo sapiens
agcgggtgaacgtagtgtctgtgccccgttcttgccccctcagtactagagtctccggcttcgctcacgcgccttgggcataagagtcctctcgttggtcccggaggtggggttgcgctcacaaggggcgaccgtcgccacggtggcggccactgcatcgcgtcccacctccgcggccctgggcgccgtggtgtcgacgggccccgagcctatgacgggccagggccagtcggcgtccgggtcgtcggcgtggagcacggtattccgccacgtccggtatgagaacctgatagcgggcgtgagcggcggcgtcttatccaaccttgcgctgcatccgctcgacctcgtgaagatccgcttcgccgtgagtgatggattggaactgagaccgaaatataatggaattttacattgcttgactaccatttggaaacttgatggactacggggactttatcaaggagtaaccccaaatatatggggtgcaggtttatcctggggactctactttttcttttacaatgccatcaagtcatataaaacagaaggaagagctgaacgtttagaggcaacagaataccttgtctcagctgctgaagctggagccatgaccctctgcattacaaacccattatgggtaacaaaaactcgccttatgttacagtatgatgctgttgttaactccccacaccgacaatataaaggaatgtttgatacacttgtgaaaatatataagtatgaaggtgtgcgtggattatataagggatttgttcctgggctgtttggaacatcgcatggtgcccttcagtttatggcatatgaattgctgaagttgaagtacaaccagcatatcaatagattaccagaagcccagttgagcacagtagaatatatatctgttgcagcactatccaaaatatttgctgtcgcagcaacatacccatatcaagtcgtaagagctcgtcttcaggatcaacacatgttttacagtggtgtaatagatgtaatcacaaagacatggaggaaagaaggcgtcggtggattttacaagggaattgctcctaatttgattagagtgactccagcctgctgtattacctttgtggtatatgaaaacgtctcacattttttacttgaccttagagaaaagagaaagtaagctcaaagaggacaattccagtatatctgcccaaggcagcaacaagctcttttgtgtttaaggcataaaagaagaattctgcatagaaacatggctcatattcgaaattgctctatagtcattagaagccagagaactgctaagtctcctgcaatgtttttctgctttttgccttccccatatatatggaacttggctacctctgcctgaaatggctgccatcaacacaatgttaaaactgacacgaaggatagagtttcacagatttctacgttttattggtggaagctgatttgcaacatttgctaaatggattagatgaatgtacttctttttgtgagcttacttgcctggattgctttaaaattaacctttgtgcaataccaagaaaatagctctttaaaagaatgtctttgtatgtctcaaggtaaattaaggatttactgaataaggtgttgaccaaatccagaccattttattttatttttttatttatttattttttgagatggagtcttgctttgtcgcccaggctggagtgcagtggcgtgatctcagctcactgcaacctccacctcccgggttcacgccattctcctgcctcagcctcctgagtagctgggactacaggcacctgccaccacgcctggctaacttttttttatattttgagtagaaatggggtttcaccatgttagccaggatggtctcaatctcctgaccttgtgatccgcctgccttggcctcccaaagtgctgggattacaggcgtgagccactgcgcctggccagaccattttagaattgggaaattttagtgagaaaaaatgcactgtaaatatgctttagttttaattcagttgggatgcactacctagcgaaaattgagaaactatatacttctcagagaaatatctgacatctattgtcattccattgctattttttttccccagagacttccataatttaaaataaaatcctagatccagttcttgttttttggcataaatacttaatctattttaaatttataaaatctgagcttctaggatccagctgtgtcaacctttatttagcatatataactataaatcacttattacagatgctaaatagatcaccttttacagatgctgaaatgtttgggatatgtttgttgacaaggtaaatggaaatgagaaactttatacttcagttttcagatatatggatctagatcccaaataaatgattaatcttcattggtttctcaaattcaggttgaaatacaaattaatagcctttattgattttacttttatgagtcattgtagacatctataaatataaaagggcctgtacccaaaggatgccagaatactagtatttttatttatcgtaaacatccacgagtgctgttgcactaccatctatttgttgtaaataaaagtgttgttttcaaagccatctttaaatagttctttaaaaataggtcttttttttatattttggaaaaggcattgtttttaaagtaaagataaaatggtaagtacctaattgtatttactgtaatatcttataacatgcagatgaatgctttataagttaaatatgatgtattttttcatacttctggattatactataattcatatgaaatcttgatattagtccccacacggaaaaagtgaactgccgttgatatttggtgtttaagatagcaccattgtttaaataccgcctatgtactcccaaatgaataaaacataattcttgtcctctgagagcataaaaaaaaaaaaaaaaaaaaaaaaaaaaaaaaaaaaaaaaaaaaaaaaa

SEQ ID NO: 8195 - DNA, 4484 bp, Homo sapiens
ggcactaggaccgctggagctgcgcagcgcgcttcggagctgcctgcgggcgcacgccgtcttccccgccagtctgcccgggaggattgggggtcccagcctgcgtcccgttagtccctttttggcctcgaggcgcggagctgggagtggcacagccatggctgtgagaagggactccgtgtggaagtactgctggggtgttttgatggttttatgcagaactgcgatttccaaatcgatagttttagagcctatctattggaattcctcgaactccaaatttctacctggacaaggactggtactatacccacagataggagacaaattggatattatttgccccaaagtggactctaaaactgttggccagtatgaatattataaagtttatatggttgataaagaccaagcagacagatgcactattaagaaggaaaatacccctctcctcaactgtgccaaaccagaccaagatatcaaattcaccatcaagtttcaagaattcagccctaacctctggggtctagaatttcagaagaacaaagattattacattatatctacatcaaatgggtctttggagggcctggataaccaggagggaggggtgtgccagacaagagccatgaagatcctcatgaaagttggacaagatgcaagttctgctggatcaaccaggaataaagatccaacaagacgtccagaactagaagctggtacaaatggaagaagttcgacaacaagtccctttgtaaaaccaaatccaggttctagcacagacggcaacagcgccggacattcggggaacaacatcctcggttccgaagtggccttatttgcagggattgcttcaggatgcatcatcttcatcgtcatcatcatcacgctggtggtcctcttgctgaagtaccggaggagacacaggaagcactcgccgcagcacacgaccacgctgtcgctcagcacactggccacacccaagcgcagcggcaacaacaacggctcagagcccagtgacattatcatcccgctaaggactgcggacagcgtcttctgccctcactacgagaaggtcagcggggactacgggcacccggtgtacatcgtccaggagatgcccccgcagagcccggcgaacatttactacaaggtctgagagggaccctggtggtacctgtgctttcccagaggacacctaatgtcccgatgcctcccttgagggtttgagagcccgcgtgctggagaattgactgaagcacagcaccgggggagagggacactcctcctcggaagagcccgtcgcgctggacagcttacctagtcttgtagcattcggccttggtgaacacacacgctccctggaagctggaagactgtgcagaagacgcccattcggactgctgtgccgcgtcccacgtctcctcctcgaagccatgtgctgcggtcactcaggcctctgcagaagccaagggaagacagtggtttgtggacgagagggctgtgagcatcctggcaggtgccccaggatgccacgcctggaagggccggcttctgcctggggtgcatttcccccgcagtgcataccggacttgtcacacggacctcgggctagttaaggtgtgcaaagatctctagagtttagtccttactgtctcactcgttctgttacccagggctctgcagcacctcacctgagacctccactccacatctgcatcactcatggaacactcatgtctggagtcccctcctccagccgctggcaacaacagcttcagtccatgggtaatccgttcatagaaattgtgtttgctaacaaggtgccctttagccagatgctaggctgtctgcgaagaaggctaggagttcatagaagggagtggggctggggaaagggctggctgcaattgcagctcactgctgctgcctctgaaacagaaagttggaaaggaaaaaagaaaaaagcaattaggtagcacagcactttggttttgctgagatcgaagaggccagtaggagacacgacagcacacacagtggattccagtgcatggggaggcactcgctgttatcaaatagcgatgtgcaggaagaaaagcccctcttcattccggggaacaaagacgggtattgttgggaaaggaacaggcttggagggaagggagaaagtaggccgctgatgatatattcgggcaggactgttgtggtactggcaataagatacacagctccgagctgtaggagagtcggtctgctttggatgattttttaagcagactcagctgctatacttatcacattttattaaacacagggaaagcatttaggagaatagcagagagccaaatctgacctaaaagttgaaaagccaaaggtcaaacaggctgtaattccatcatcatcgttgttattaaagaatccttatctataaaaggtaggtcagatccccctccccccaggttcctccttcccctcccgattgagccttacgacactttggtttatgcggtgctgtccgggtgccagggctgcagggtcggtactgatggagcctgcagcgcccggtgctctgtgtcaaggtgaagcacatacggcagacctcttagagtccttaagacggaagtaaattatgatgtccagggggagaaggaagataggacgtatttataataggtatatagaacacaagggatataaaatgaaagatttttactaatatatattttaaggttgcacacagtacacaccagaagatgtgaaattcatttgtggcaattaagtggtcccaatgctcagcgcttaaaaaaacaaattggacagctacttctgggaaaaacaacatcattccaaaaagaacaataatgagagcaaatgcaaaaataaccaagtcctccgaaggcatctcacggaaccgtagactaggaagtacgagccccacagagcaggaagccgatgtgactgcatcatatatttaacaatgacaagatgttccggcgtttatttctgcgttgggttttcccttgccttatgggctgaagtgttctctagaatccagcaggtcacactgggggcttcaggtgacgatttagctgtggctccctcctcctgtcctcccccgcaccccctcccttctgggaaacaagaagagtaaacaggaaacctactttttatgtgctatgcaaaatagacatctttaacatagtcctgttactatggtaacactttgctttctgaattggaagggaaaaaaatgtagcgacagcattttaaggttctcagacctccagtgagtacctgcaaaaatgagttgtcacagaaattatgatcctctatttcctgaacctggaaatgatgttggtccaaagtgcgtgtgtgtatgtgtgagtgggtgcgtggtatacatgtgtacatatatgtataatatatatctacaatatatattatatatatctatatcatatttctgtggagggttgccatggtaaccagccacagtacatatgtaattctttccatcaccccaacctctcctttctgtgcattcatgcaagagtttcttgtaagccatcagaagttacttttaggatgggggagaggggcgagaaggggaaaaatgggaaatagtctgattttaatgaaatcaaatgtatgtatcatcagttggctacgttttggttctatgctaaactgtgaaaaatcagatgaattgataaaagagttccctgcaaccaattgaaaagtgttctgtgcgtctgttttgtgtctggtgcagaatatgacaatctaccaactgtccctttgtttgaagttggtttagctttggaaagttactgtaaatgccttgcttgtatgatcgtccctggtcacccgactttggaatttgcaccatcatgtttcagtgaagatgctgtaaataggttcagattttactgtctatggatttggggtgttacagtagccttattcacctttttaataaaaatacacatgaaaacaagaaagaaatggcttttcttacccagattgtgtacatagagcaatgttggttttttataaagtctaagcaagatgttttgtataaaatctgaattttgcaatgtatttagctacagcttgtttaacggcagtgtcattcccctttgcactgtaatgaggaaaaaatggtataaaaggttgccaaattgctgcatatttgtgccgtaattatgtaccatgaatatttatttaaaatttcgttgtccaatttgtaagtaacacagtattatgcctgagttataaatatttttttctttctttgttttattttaatagcctgtcataggttttaaatctgctttagtttcacattgcagttagccccagaaaatgaaatccgtgaagtcacattccacatctgtttcaaactgaatttgttcttaaaaaaataaaatatttttttcctatggaaaaaaaaaaaaaaaaaaaaaaaaaaaaaaaaaaaa

SEQ ID NO: 8196 - DNA, 2603 bp, Homo sapiens
  misc_feature (1435)..(1453): n is a, c, g, or t
aggtgtgtgtgtctgagggtgtgtgtgtgagtgtggctggccccagtacctggccaagcccaccacttccacctgggccctacacccccacaatgtgtacccctcttatctgccctggagcctgtacagccatgccacgctacccctgagagtctagaaagctggtcactaactttgcagacggatgagccttgagcacccagaggagactggggctgtcaacgctgccccttgtcctgccggcttggatcccctgacagggtccttctaggcttcagactggcaccctgaccatggaaccctgaagtggcagtgacttctagagctcagtggcagaccccacgacccttcctcccccttcctccccctcccaccaccagctttcaagctcccagagggaggggtggggaggggatcctgatctcacagggcagggggcttccatcatgatgctcaactcagacaccatggagctggacctgccgcccacccactcagagactgagtcgggcttcagtgactgtgggggcggggcgggccctgatggtgccgggcctgggggtccgggagggggccaggcccgaggcccagagccgggagagcctggccggaaagacctgcagcatctgagccgcgaggagcgccggcgccggcgccgcgccacagccaagtaccgcacggcccacgccacgcgagaacgcatccgcgtggaagccttcaacctggccttcgccgagctgcgcaagctgctgcctacgctgccccccgacaagaagctctccaagattgagattctgcgcctggccatctgctatatctcctacctgaaccacgtgctggacgtctgaactcagcctgtctcccacctcccgggcctctctggggcccctttccaccgctcactgcttagaaaggccgcatcctccccgagcccttataccttggcatggagtcccaaaggccctgggcacaggcagagagcccaccggctggtcatgagggcctcttcctttctctgacccaggcacctcgagggctattctcctgggttccttccggggtttattgctgaggcccagctgtgcagaattgtttgctagtgtggttggtatggaatccttgctggctttactaagccagccacacttggagtctgcccccaagctctctcactgaatgctgcctcttctacccctatgtccaaattttcagccaccacagacctcagctgtgtatcctatctgttctagcttctcctgcccctggtggggatgggctgtcagaattgcaagggaggaaggctggggttagagtggggagtgggcttcttcctccaagatctcagtctctcagtgcttggcagaggggtgaggccctggggaggcaggggttggtgccctgactcctgtgaggggaatctcagtagctgggaatnnnnnnnnnnnnnnnnnnntttctgtccatcttgttcctgtggcttagcacatacagacctcagatcttacttggtagtgagtgccttgccctctttgagctatttggctacttccctgtccctctgactcctactgtcccaattttctccctccctgtgtgtcactagagaaaaaaaaaaacaaaaacctagattccggattaggggatgacatcccaaacagcccggagtatttgcagaaggctcaggcaacgagtgggccacatctcacttctgcttcctcatctcagcccactctgaaaatgtgcagcaccctcactggttcctccccccaacgcaaggaggatgcccaattgttgccctctaaaaatgcacagttctcctggccctaggacttacttattacatttttttctctttccttgagctgcctttggcaagggaagagacccccaactctgcgcccctactccatgctgctgatccccacctgcgcactatagcgcagggtcagcagtggaatgaagggccttagaacctgcatagaagaaatgaactcactgcatttctgtgctccctcctccctcgcaccaaactcctagctctacaagtatatttatttatttatttatttattcatctatttatttacttatttatttatttatttataaatattgctatttattgccgagttgtgcactttggggtagagtgaggggctcccagcagctctagctgggtctctcttgcttcctccctgcttacgcctttccttttcttgctccttcttcaactcctggtgtgtgtgagcatgccctttgcttgccacaccatatcctttccccagatccacctgtcctgacactctagtcctccaggatagtgctcctcccccagctccagggctcctggatgtccttcctcaactccctccacccctagacaatcctacctggtcccatctgcctcttttctctccccagcctgccctgtgacccttgcctcttcctgatactcccaagagcaggccccaggggtctgtgtcacatatctctgtgtgattccttctggttgcatccccaatttcatacaaaaaaaaaaaaaaaagtgacctcgttctagcaccaggaaaaaaaaaaaaaaaaaaaaaaaaaaaaaaaaaaaa

SEQ ID NO: 8197 - DNA, 2913 bp, Homo sapiens
  misc_feature (1442)..(1500): n is a, c, g, or t
agcggggcgtggctgtgggtcccggattagcggcggcatgggacggttgagttggcaggtggcggccgcggcggctgtgggcctggctctgactctggaggcgctgccttgggtgctgcgctggctgcggtccaggcggcggcggccgcggcgcgaggcgctgttcttcccgtctcaggtgacctgtaccgaggccctgctgcgggctccgggcgcggagctggccgagctccccgagggctgcccgtgcggcctgccccacggcgagagcgcgctaagccgcctgctgcgtgccctgctggccgcccgcgccagcctggatctctgcctgttcgccttctccagcccgcagctgggccgcgccgtgcagttgctgcaccagcgtggggtgcgagtgcgggtcgtcaccgactgcgactacatggccctcaacggctcgcaaatcggtctgctgcgcaaggcagggatccaggtccggcacgatcaagacccaggctacatgcatcacaagtttgccatcgtggacaagagggtgctcatcactggctcgctcaactggaccacgcaagccatccagaacaacagggagaatgttctcatcacggaggacgacgagtacgtgcggctttttctggaagaatttgagcgcatctgggaacagtttaaccctacaaagtatacctttttcccaccaaagaaaagtcacggaagctgtgccccacctgtctccagagctggagggagattgctttcatggcacagaacttgcggcacctccagcgaaagccaaacctaaccaagaatggggctgagccctccctgcgggctgctgtgcgttctgagggagggagacctcggcactagaaaaaaatcgttaaactaaagtctcgtctattagaatactaaattgaactaaagaaggttaggaaagggaaatttctgttacttcgggtcagttatttcgggccagacctttttcttgctcctttgccaaaataacttcagtcacgacctgccacggggtgctttcatgagtgtggtccgtatcttggtttggaatcgaaacttctgctacagcacagaaaaggcacagtgcctcttccaggtcgatcccattcccttccctgattctagaaaagtccctcctgctttggctgatgtgggccctttcagcatctccctgagatttcatccttctctccatgtggcacgactggggttggttggggcctacagtctccttgtccctcacagtctgcccctgtcagggctcggtcctcagagtaaggaaaggaaatggaagtcaggaggaagggaagatgtgagtgtgcggtgcgggtggcaaaagcagccttcggggcaaccccgtgagcgtcattgccaccaaaggctggctgttcccttgattccttgcataattgctctttaaaaccagtatgcannnnnnnnnnnnnnnnnnnnnnnnnnnnnnnnnnnnnnnnnnnnnnnnnnnnnnnnnnngactgatggccagcagctgtttctatgttgggcttttaactttttttattttatttatttatttatttatcttttttgagatggagtctcactctgtggcccaggctggagtgcagtggcgcaacctcggctcactgcatcctctgcctcctgggttcaaacgattgtcctgcctcagcctcccgagtagctgggattacaggtgcctgccacaacacctggctgattttttttttggtatttttagtagagacagggtttcaccatgttggttaggctggtctcaaactcctgacctcaagtgatccaccacttccgcctcccaaagtgctgggattacaggtgtgagccgccatgcccggccgggcttttaacttttaatgtcctaatgttaaggtaattttgttgtgtgtttagaagtgaccttacctttaacacctgtggagttagtgcgtgcacattgctggctcagcgtaacccatcacgggaccggaggagaggagagcggggaagaggagagcagcttcaggccgtggtgtctcccacgtctgtgttcttatttgcagctcagggtttgcattcccaggtagaacaggtgtcgtacactgtgaaatgttccaggttatttgtttataatgtgtgtgtcatatacagatagctccaatgacatctgaagttgtgacttcatcatcttgtcatatttctgtatgatgagccccagggcccatcctgaggtctgctagccatgtgcttagtctcacctccccagcccacgctggcattaccacccagagacccttcagtgctgtgtgtttttcctttttagggttacttttgactcacagtgttaggcaagccagcttggaagttaacttttaaaaaaattcaattgaagctgtaaagtataatatatagattggaagtcaccagaaattgttttagtttgtgaattcccccagtgtatgttctgaaaagaaaatgggagagcttgtaaagcatctcctaaatgcgaagccgcgtgaccctggacttctggcacatctgaataaacatgttcttattctggaaaaaaaaaaaaaaaacaacacaccacaacacaccaacaaaaaacggggcgcaccgtcacagaaaattcactccagaagagcgcccacaaagaaacgagtatcacacacattcggtgcgcacaaggggtcccccacaagcagcgccacggacttacaagaaagagaagccacagccaccctgtgtaacaacacaaattaggagctgtgcaaaacaactggcgcatagacgccaccacggggaagggaacccactaacgcgcgggcgggcgaccacaaaggtggccacaaccacccaagcagaaacttacagcgcgcgggccacatctaagcagcacgacgcacccag

SEQ ID NO: 8198 - DNA, 2796 bp, Homo sapiens
  misc_feature (793)..(819): n is a, c, g, or t
  misc_feature (836)..(868): n is a, c, g, or t
  misc_feature (2470)..(2470): n is a, c, g, or t
attcggggcagcaacgcgcagaaggtggtgggcgcctcgggctcggggggcgcgggcccccaacccgatccggcgggcccggggggcgtcccggcgctggcggccgccgtcctgggcgcctgcgagccccgctgcgccgcgccctgtcccctgcccgcgctcagccgctgtcggggcgcggggtcgcgggggtcgcggggcgggcggggggcggcggggtccggggacgccgccgccgccgccgagtggatccggaagggcagcttcatccacaaacccgcgcacggctggctacaccccgacgccagggtcctggggcccggggtctcctacgtcgtgcggtacatgggctgcatcgaggttctccgctctatgcgctccctggactttaacacgcgcacgcaggtgaccagggaagccatcaaccggctccatgaggccgtgcctggcgtccggggatcctggaagaaaaaggcccccaacaaggccctggcgtccgtcctgggcaagagcaaccttcgctttgccggcatgagcatctccatccacatctccactgatggcctcagcctctccgtgcctgccacgcgccaggtcatcgccaaccaccacatgccgtccatctccttcgcgtcaggcggagacacggacatgacggattacgtggctacgtcgcaaggaccccatcaaccagagagcctgccacatcctggagtgctgtgagggcctggcacagagcatcatcagcaccgtgggccaagctttcgagctgcgcttcaagcagtacctgcannnnnnnnnnnnnnnnnnnnnnnnnnnagaaaggctggcagggnnnnnnnnnnnnnnnnnnnnnnnnnnnnnnnnnctctttggagcacaattactacaacagcatcccggggaaggagccgccgctgggcgggctagtggactccaggctggccctgacacagccctgcgccctcacggccctcgaccagggcccatctccttctctaagagatgcctgcagcctgccatgggacgtggggtccaccggtacagctccaccgggggacggctacgtgcaggcggacgcccggggccccccggaccacgaggagcacctgtatgtcaacacccagggtctggacgcccccgagccggaggacagccccaaaaaggatctgtttgacatgcgaccctttgaggatgccctgaagttgcatgagtgctcagtggcggcaggcgtgacagcagcccctcttcccttggaggaccagtggcccagcccccctacccgccgggcccctgtggcccccacggaggaacagctgcgtcaggagccctggtaccacggccggatgagccgccgggcggcagagaggatgcttcgagctgacggggacttccttgtgcgagacagcgtcaccaaccccgggcagtatgtcctcaccggcatgcacgccgggcagcccaagcacctgctgctcgtggaccccgagggcgtggtacggacgaaggacgtgctgtttgagagcatcagccacctgatcgaccaccacctgcagaacgggcagcccatcgtggccgccgagagtgagctgcacctgcgtggcgtggtctcacgggagccctgagccaggtgaccgttctcagccctggctcctgcctgttctcagccccggctcctgcctgtcatggccttggggctctcagccctcctcctggatcctggtcaggccgaaccaccgctgcctctccttcctccgcatgagcctctggcatggtccttcctccagctggccccgggctgggcagagcctcctcctgccggggcccctgcccaccccctcctttgcctggagtgagggtgttcataccaaagacggaaccatttcgcctttaaagaaaatatatccagaagcagccgctgcctcggagccctggcccgtgggtccccctctcgcctggctggttcggtctaacgccccggagagtcagggctcccaggaccctggggaggaggcggattccgggcctggctgggcttcctcttcccacctgaggactgggtgcacagttgtctttgaggggggacgcttaaggtgctttggggttctcaggccaggatacatgctggcgctgaagtgcaggcagccttgaggtcacctgggatctcggggtagccaggctgctccaagacagtggatatcgaggcagtcgtgaggcccctactccacctgggagcaggggaaggacgtggttgcctggcctggggtgcgcccagcagcttccccccaatcctgccctcccagctgtcgacccagatgggatgttcggatcggtttgtaattaaacctgggaatggccacaagaaaaaaaaaaaaaaaaaaaaaaaaaaaaaaaaaaaaaaaaaaaaaaaaaaaaaaaaaaaaaaaaaaaaaaaaacctcagggggggccccaatccccaattcaccctatantaattcattttacaattcactgaccatcattttacaacttcttaactggaaaaaccctacctttccccaacttaatccccttacaccacatccccctttccccatctggcttaataccaaaaaggccctcaccaatcacccttcccaacaatttcccagcctaaatggcaaatggcaaattttaaactttaatattttattaaaattcccattaaattttttgtaaatcacctcattttttaaccaataaacccaaatttccaaaatcccttttaaatcaaaacaatacacccataaagggttaactgtttttccaatttggaacc

SEQ ID NO: 8199 - DNA, 677 bp, Homo sapiens
  misc_feature (290)..(301): n is a, c, g, or t
ttttttttttttttttttaaatccaaattctattatttattgagtagtagccacaatcaagtcattgggtttctatgaaccccagtccatctcatataaagtgataatgatgatagctaacatgtactagcacttaatatacaccgggtaccattctaagggcctcaaatggataacataatttattcttcacaaaaatgttctgaaatgagaagtatgagtgtccctactttacagaagaggaaactgaggcatagagaggttagggaacttgggaatggtggagccannnnnnnnnnnncggcagtctgcctttgggggatcttagcccatgtgtggaacaatacttacctcaactatatcatagagtttctaggagttgcattagaaaatgagtataaaagcatcttttaaaccataatctattagtcttggaaatactgagcaagatgctgaatctcaagttgtaagctttttttttcttttctttttttatttagagacagggtctccctctgttgcccaggctggagtgcagtagtgtgatcatagctcactgtaacctctaactcctgggctccagtgattttcctacctcagcctcctgagtagctgggacgacaggtgcgcactaccacgcttggctaattaaattttttttttttttttttttctgt

SEQ ID NO: 8200 - DNA, 843 bp, Homo sapiens
  misc_feature (832)..(832): n is a, c, g, or t
ttttttttttttttttttaagcttgacctaagcatacacagaaaaaattaatatttttgttgttgttctagattctattattcaggcaggctttctatattttccccttaggtatctatactttagtatagatgctgtcactgtgagagactacagaaagcagggaaaatagaagttctatagcttcatctaccaaggaagatctagtttaaaacctagtaggggacatgtcccaacaacttgaaaattagtttgacatgtggtgactttatagcatagtggtcaggagttaaacctacattccagctctgccattttctaggtagtggctttgggcaagtttcttagccactataagcctcagttttcacatccgaatattggaactatattaaaacccaactcaaaggattgttttgaggatgaaataggagaatgtatgtaaaatgtttagcacagtggctagcaatagctcagtgaatattaataaatattcttaaaattgaataatagaatacaactcttcccatgtcttcgggtagcttcagatccaggaaaatctcttacgttttgcaagattttgtggggtggttctttttggggagaagtttcatagattggctcagattgtcaaaagaatctatggccccccaaaatgttagaaccccatgaattagatgaatatgggaactaaagaaacactgtcttccttgttgacaagtgtcgtcttcctgccctcagacaatcctttggctacaagtgttcccatggaacctaatagaccagtttggagtttctcgttttatgaaatcctgagctatctctgatttcnccaaaaaaaaa

SEQ ID NO: 8201 - DNA, 7816 bp, Homo sapiens
  misc_feature (2226)..(2241): n is a, c, g, or t
  misc_feature (2906)..(2920): n is a, c, g, or t
  misc_feature (3309)..(3334): n is a, c, g, or t
  misc_feature (5116)..(5142): n is a, c, g, or t
gaaataatggccccctttgggaataaaagagatctcaaatcctgttgcagtcagtagcgctggctgtctgcagtagagatggttttcaatgattgtttcagaaattccttatcaacagaaaatgaacgagacggggagttttcagaaaataaatggatttgcagacaacttaacgtcatcatcgaagtcaccaaagaaagcaaagcagcgactggggaagctgaggctgaagtagcaagggcatgccacccaggctgctattccagtcgctgtgaaagcctggtcactgtctttgccacgcagaacacatctctgggaatgctgtcgatctatgcctccatcttttaaaggctttccatttctgtctggattttttctttatgggaggcagaaataatagtgaattgaatgaaatggagtatataagtgtctagcacagtccttggcacatagaaagtgctctgtaaacagtgcttcgcatcaaattcttgggatgaatgaaagtgagtgcctggcgctgcacataagaaaagacgtggcagcaaaccatcctcccgacatgacgtgctgcgttggtgcgtttacgtccctgttccttctgaaagactcaaaattgtgttggagctactggtgcacctttgtaagacctgcactaacgaccgcgccactgggaagggcacttctttatgaagtcgccgtattcccagggagactggtcaacccatacaatgtgaaaaaaaaagaagctatgtgaaaaaatattcccctttgtcatagagaaggagaacttggtgaggctgggcagctgcaggagcctcagtttttcagataacagaacagagtagaccttgagggtccatttccctttttgttttaggaagtgctgtagaagggggcaaagagatctttgatatgagaaggtatttcttcaaagcagcatcgtgcctgaaatagcattgttctttacgctgagagaggaggaaatgggaatttggtgttcaacgggtttaaagtttcagttacaagaaatggacaagtccgagagctctgctgtgccacatcatgcctaaagtcaccgagactgtgttgtacacttttttgttaaaaggtaaatctcatgttaaatgttgttactacaattaaaaagaagccctaggctgtgtttgcagaaaggcactaaccatacatgtgctcaagagcccttttgtgttttcttcacttcatgttgtagttcaatttagttttgctttgcaaggatcctcggaaagtgtatcatcagcaatgacttttattttagaactaaatgtgaaccacggggggaatcatgatcgacattgctcgttgtcctttcttcctccctgtgggctgtgaatccaactcgtcctgggagcagggcgctctcgccttctgttcctctccgagctcagtgcacagaagcattctgcttacccagctgggactgctgactgcaccatcgagcacgcaggttgcactgttctcagcagctacactggattatatgccgcctttcttactgactgattatgaacttaaaacaaattcactctgctgctgtgaattatacatttatttttaagcatttatttcaactcgagatgagcggtctctcctgtaaatttctccctgctggatctttgctctggtttctggtgacatagtgtgagtgccggcagccgcgagcctcagaaggaaaattacaaagggaatactcagtaaatgatgtattgcctttcgcatcagtagcctgcttggaaatgttcaaattatcagcccaggagactccagtgctgtggacatgggtctgaacgaattgatcacctaggggctactgagaacgcggtgctctgtccaccatggagcccttgtgtccactcctgctggtgggttttagcttgccgctcgccagggctctcaggggcaacgagaccactgccgacagcaacgagacaaccacgacctcaggccctccggacccgggcgcctcccagccgctgctggcctggctgcttagcgcggctcagccatgagcaacaggagtagcttttcccggctcacctggttcaggaagcagaggaaagctgtggtcagcaccagcgacaagaagatgcccaacggaatcttggaggagcaagagcagcaaagggtgatgctgctcagcaggtcaccctcagggcccaagaagtattttcccatccccgtggagcnnnnnnnnnnnnnnnnccgtatcagatccgccgacgactgcaagcagtttcgggaggagttcaactcattgccatctggacacatacaaggaacttttgaactggcaaataaagaagaaaacagagaaaaaaacagatatcccaacatccttcccaatgaccattctagggtgattctgagccaactggatggaattccctgttcagactacatcaatgcttcctacatagatggttacaaagagaagaataaattcatagcagctcaaggtcccaaacaggaaacggttaacgacttctggagaatggtctgggagcaaaagtctgcgaccatcgtcatgttaacaaacttgaaagaaaggaaagaggaaaagtgccatcagtactggcccgaccaaggctgctggacctatggaaacatccgggtgtgcgtggaggactgcgtggtttggtcgactaaacaatccggaagttctgcatacagcacaggtccccgacggctgcaaagcccccaggctggtctcacagctgcacttcaccagctggcccgacttcggagtgccttttacccccattgggatgctgaagttcctcaagaaagtaaagacgctcaaccccgtgcacgctgggcccatcgtggtccactgtagcgcgggcgtgggccggacgggcaccttcatnnnnnnnnnnnnnnngatggccatgatgcacgcggagcagaaggtggatgtgtttgaatttgtgtctcgaatccgtaatcagcgccctcagatggttcaaacggatatgcagtacacgttcatctaccaagccttactcgagtactacctctacggggacacagagctggacgtgtcctccctggagaagcacctgcagaccatgcacggcaccaccacccacttcgacaagatcgggctggaggaggagttcaggaaattgacaaatgtccggatcatgaaggagaacatgaggacgggcaacttgccggcaaacatgaagaaggccagggtcatccagatcatcccgtgtaaggcacccgtggcgtggcttgggcagggctggggctgggctggtgccggannnnnnnnnnnnnnnnnnnnnnnnnnaccgcttacccctgtgcaccagggtcaaaagcagggtgtcctctggcctcaggctaagggctcctgtgtgctgtaccaaatgtcaggtagaaaagacacctgtgaagcaccagctgacccagacagtcctgcatgggtctcaggcaagctgcttgggatatgagcttgcagatgcgggagggacgccgaggctgatttcaggggagggcttcacagaagctggagatttgcggcaggcacgacttgggattccttgtctcattccttgtctccccaagcctgggcagaggcccgcctcccccttacacagaggggcctgagccacccagccgaggccatgcaggtgaactcagctgagaccacctaggaaaaggctgtggccttgaggaggacaagaaatgggcctagggtagagtcaggacactggtctgccacccaggtcatgggagagggaaggaggacctggcaggtgtgggaggagtggaggcaaagctggcaagaagacagggccacatgcagtgggcaggggagtgggaatcgggaggctcaccaagtgggaaaaagagaaacttgagaaacccggccccaaagcagactccacagggatccgaggaactagggagggaggtgggagatgccccgcttgggaggagggtgtgcctcgttatagacttgtcctcgacagagtcacagctcaacaaacaccatctggaaacagctgggagcaggcctgctgcagcagggtctccccgagcactgcagatgacttcaaccgagtgatcctttccatgaaaaggggtcaagaatacacagactacatcaacgcatccttcatagacggctaccgacagaaggactatttcatcgccacccaggggccactggcacacacggttgaggacttctggaggatgatctgggaatggaagtcccacactatcgtgatgctgacggaggtgcaggagagagagcaggataaatgctaccagtattggccaaccgagggctcagttactcatggagaaataacgattgagataaagaatgataccctttcagaagccatcagtatacgagactttctggtcactctcaatcagccccaggcccgccaggaggagcaggtccgagtagtgcgccagtttcacttccacggctggcctgagatcgggattcccgccgagggcaaaggcatgattgacctcatcgcagccgtgcagaagcagcagcagcagacaggcaaccaccccatcaccgtgcactgcagtgccggagctgggcgaacaggtacattcatagccctcagcaacattttggagcgagtaaaagccgagggacttttagatgtatttcaagctgtgaagagtttacgacttcagagaccacatatggtgcaaaccctggaacagtatgaattctgctacaaagtggtacaagattttattgatatattttctgattatgctaatttcaaatgaagattcctgccttaaaatattttttaatttaatggtcagtatattttgtaaaaatcatgttaatttatttcatagttgacattaatatcttccctaatttctttgtatatattttgttatgccttaaaggccacctgctatacagttgttaaatcttaaatatgctttttaaaaattggaataatgtattaaggtcaaataatatcccataaaatatatatttctgctaatattagtaaactatcttaatttttcattagattcatatcatttaatttcacatattcaacacctttaaatgttnnnnnnnnnnnnnnnnnnnnnnnnnnntgcaagatactaacacaaagctcatgttaagaaaacagttgaggactcggaagtcagttgaaaatgcactttcctaacagtgaattcacaaccctgaacagcagcatttttggaaggcaaactgttcgtgatggtacaatgtaaatggggacttctgtaaagttctcagtttcggtccatgtggtttatctttacattttgaagatcaaagaagtctttacaacctgaatccaggtctaaaacacactagagtagctggtgactataaataatatttaaaaatgctgtgtctacaccatcaagactgtgtctacactatcttggctgaacgagaagagatgtaaatgctgggtggtcccgttgacccacggcgttgggtacaacaaaaccagccatcggagttacaccccaaagcaccatttgctgtccagctgcctgtcgtttggcccagaccaccctcagaaaaaaaccagctgcctctcccattctgccctcccgttctgccacagcggcctgggctggtccagtgctatgcctggaggctcaacacaaaacttcccatccaaacattcagatgaactgagcgtcttacacacgcagtacagaggagcacacattgggatagaaacagtagaataaccacgggcaattaaactttaaattttctgagcagcattttggtatttaaacatttcttgtaaaaagctgagacagtttgtaagaaaagaatccttaaaatctagatttataccattttttaaagtcccacctttcaatgtttaataaaacaaaaagagaaatccttaatctaaaagctaaattatttttgaatggaaatactactgagaccattgacactggataacagtaatgatcccattaccagataagattgactgatggggaaaaaaaaaaaaaagaatggggtgtgaatgtaccaacactgaatcttacagcagttatctttctatggccattaggtacctagcagatgtgcacaatataaacaaaaagatatctggcctaccttactactaaaagcatttaacacatgcatttttggtacttttttttgttttctaaaagctacataaaggccttatttgacattttcactgataactgatcgcaccctcgtgttgcagtgttcgtcccctattcattaacagtgtgtgcaaatgcaaccccaggacacgttattgttctgatagatgctcacagggaatcaagcttctcgcccactccacggctctgagccccatccaagggcaagacttggtgcccagctggaaggacgaaagcacactttgtgaccgccatcctcaccagctgcatgcctgggctgcacactgctgaacgtgctcctctctccttctctgtacaatgattcagcatctcggcggaagaggaaaatggagctttttgaggctcgccaggtcccttttgttttcaccattaaaattccaaacccaaagcctttgtttgactgaaggagaagagagggaagtaagcttctgttcagcacctgaaccctagaaaaagagccagtttgctacgatgaaggtgacatttctctggtcatttgagagttcgaagtcaaagccgaggggcacaggctttggttcatgtctaggagccctctgtcagaatccttgaagccctttaatggtctaactggcatctcttgtatcaagaagtacctttaaggtagaccttttcagggtgccctcaggaaagggccctgctcatgtttttttcctgtccccttagaccaaccccaggtgtccactgcaggggttctgcctgttcccaaactttttccattccaggaacaaaggagaagccactttccccaggacgcaggactctcccctccactgtccgggacagcgttcgccctttagcggggaggtcattacagcctcatggcctctaccaaggccccagatcacaggatctcctgggccttggagcacctcacgctgggggaatcaatccctgagggactcagaatcttctccgtgcaacctggaaagttcatctcttgtttccttcagtcaaagaaagtccattgtacataacaaaacagcccccaaacagcccagtgccgacaccattgttcctttcacactttcctttgttgcatgcagttgggttcaaatgccaaatagtgattagaagacgaccattctgatctgtgtgtgatctggtcactatgtgactgcctttacggtttctctccatgtgctatatgaatgaagaatgcataccagtgttttaaaaggtatttttatgtgtttttaaacacttttttaaatgagcctgacacctgtgtttcagcatttggagacatccccatgttattcttttaagtgtataattactgatacttttttgtttgtttgtttaactaagttgtgtttaatttatgtgcagtctttataatgtatgtatgttattacagtttcaactatcatattttctttgattacatttataatttgatcttgctctgattataatgccagtgaatgttgctgaactctttgtatatgcaaattgcaagatttaaaccattctgatgcaaggataaacctttactttgactaccaaaaaaaaaaaaaaaaatttaaatctcttaatttcattcctctgcaaaaaaataaaaaaaaaa

SEQ ID NO: 8202 - DNA, 4494 bp, Homo sapiens
  misc_feature (1311)..(1356): n is a, c, g, or t
  misc_feature (1632)..(1634): n is a, c, g, or t
  misc_feature (1640)..(1654): n is a, c, g, or t
cgcggcccgcgcgacgctgcgagaagacgacagaaggggagggtgagaagggccggctgccggagctggggcgatcttcccggagccggagaccctcccttgaaaccggcactgggacttctcgatctctggaggcacctgttgcaagtcacagcgctcggccgtcgagcggggtcgctaacccgcactctcttcggacctacgacatcgcggcttctctggcgttggccagtcagccacagggaactagtaaaaaaagaaaaagaaaaaataaagtgaaagaggcgtgttgtctagtttcaaaggagaggagagaagagactgagtcgccctgtgttgcccaggctggtcttgaactcctaggctcaagagatcctcctgcctcagcctcccaaagtgctgggattacaggcaactctggtagctctccttgtctggttgttttgaagaaagaagagtagaagaaaaagttgagtaaatcatgtcggagttactggacctttcttttctgtctgaggaggaaaaggatttgattctcagtgttctacagcgagatgaagaggtccggaaagcagatgagaaaaggattaggcgactaaagaatgagttactggagataaaaaggaaaggggccaagaggggcagccaacactacagtgatcggacctgtgcccggtgccaggagagcctgggccgtttgagtcccaaaaccaatacttgtcggggttgtaatcacctggtgtgtcgggactgccgcatacaggaaagcaatggtacctggaggtgcaaggtgtgcgccaaggaaatagagttgaagaaagcaactggggactggttttatgaccagaaagtgaatcgctttgcttaccgcacaggtagtgagataatcaggatgtccctgcgccacaaacctgcagtgagtaaaagagagacagtgggacagtccctccttcatcagacacagatgggtgacatctggccaggaagaaagatcattcaggagcggcagaaggagcccagtgtgctatttgaagtgccaaagctgaaaagtggaaagagtgcattggaagctgagagtgagagtctggatagcttcacagctgactcggatagcacctccaggagagactctctggataaatctggcctctttccagaatggaagaagatgtctgctcccaaatctcaagtagaaaaggaaactcagcctggaggtcaaaatgtggtatttgtggatgagggtgagatgatatttaagaagaacaccagaaaaatcctcaggccttcagagtacactaaatctgtgatagnnnnnnnnnnnnnnnnnnnnnnnnnnnnnnnnnnnnnnnnnnnnnnggagacagaagcaaatccgtcccaggcctcaatgtggatatggaagaggaagaagaagaagaagacattgaccacctagtgaagttacatcgccagaagctagccagaagcagcatgcaaagtggctcctccatgagtacgatcggcagcatgatgagcatctacagtgaagctggtgatttcgggaacatctttgtgactggcaggattgccttttccctgaagtatgagcagcaaacccagagtctggttgtccatgtgaaggagtgccatcannnggcctnnnnnnnnnnnnnnnagaagcgctctaacccatatgtgaagacttaccttctgcctgacaagtcccgccaaggaaaaagaaaaaccagcatcaagcgggacactgttaatccactatatgatgagacgctgaggtatgagatcccagaatctctcctggcccagaggaccctgcagttctcagtttggcatcatggtcgttttggcagaaacactttccttggagaggcagagatccagatggattcctggaagcttgataagaaactggatcattgcctccctttacatggaaagatcagtgctgagtccccgactggcttgccatcacacaaaggcgagttggtggtttcattgaaatacatcccagcctccaaaacccctgttggaggtgaccggaaaaagagtaaaggtggggaagggggagagctccaggtgtggatcaaagaagccaagaacttgacggctgccaaagcaggagggacttcagacagctttgtcaagggatacctccttcccatgaggaacaaggccagtaaacgtaaaactcctgtgatgaagaagaccctgaatcctcactacaaccatacatttgtctacaatggtgtgaggctggaagatctacagcatatgtgcctggaactgactgtgtgggaccgggagcccctggccagcaatgacttcctgggaggggtcaggctgggtgttggcactgggatcagtaatggggaagtggtggactggatggactcgactggggaagaagtgagcctgtggcagaagatgcgacagtacccagggtcttgggcagaagggactctgcagctccgttcctcaatggccaagcagaagctgggtttatgagtccctgtcctcttctgcaggtccagccctggcgagggcaggtcagaggaagtgaagaaatcaagagcaaagatttataatttaatgtgtatgtgtgtatgtgtgtatgtgtgtgtgtgtgtgtgtgtgtgtgtgtgtgtacaaacatgtattttctgcaaatctcattatgctggctagagtgatgcagacttgttcttctttttaaagcagtctcaagaataagcatttctttaaaatgtttctgtgtataatctagtttattttcagagtccattttttcttatgtctttataaggttcacttaacttaaaaacagcttttaaaacaactttttatcttctgtcttgctatcattgttcctacttccctaggaagccctggctacctttcgcattaggaccagtctgggttttaaggctctgggaagcagggttggttagtaaagacaggaatgttggggagaggtgagtagttccttcctctttctcctctccaatttatgcttttaacttattttctacctggataaacttctggaacttggcttttaaatttaacttttctagtttttaagcagtttccaccttgctttggtctaatgcttttctttgaaatgctaacagaattcccaagctttttccagttctagatatctttactagacctttgggggactcttataatggagctgcttttgaaaagcactttaattagataatgtattttgactaaatcacgaggatgcccagtgagagcttctagctgatctcagaggaccagagtgactgagggtaaagtgtctcacagcccatgctgaattttctgcattttaaactgatactgcagtcattggagagagagctcctcatttctcgaatgaaagatgagatatattcatcctcatgtaccacatctgtcttagtgtttgcgtctggggtgtgttatcaaacagagcatggtctacatcccactgtgtcaaccagaagagccaagtgttatctcaattggcccagtgtttctccaggctggggactgttaagggctctaagggaatgtagacagagtctccctgttattctgacttcctgcttgatgagctttcagttcctgtttttgctattgtttcctaaatttgacctacatattacatgggtgtagtgtgttgaggcttttcaaagaagggtctagtgagctaagtttcatcttctggtactcattgatcaaactgacctttctattctcataagcgtttctacccaaagttgtgtgtggaaggagtgtatagcagagaggaaatccctttcaacagagtcagctgctaactgatttcctataagcacactggattaagggcagccacagtggtttctactgtatgtatgaaccgaatggaggaatgttttcaaagattgatttggtgtggattgcaattgtaatggaaggcataacttgggatcccgggctgtaacttgctcttttgtttcccacccccctgacatgtatgtgtgctttaataaagctttctcacttgtcaaaaaaaaaaaaaaaaaaaaaaaaaaaaaacttttgtctctgatgtcctcactgttgcttttcccctggcttgaaggataagaaccaaagtgataaatgctcttccctaaccatcctatgctgattgaagaaaattcacctttccccgcattgctgcctgataccttaaatgcctgatactttcgctgagcttgatccctcgtcctttgtatttggtatctaaggagaacactgagaaatcatctttaaagtggcaccacttttctatcttgtaacaaaggaactcttcctttagctttgcagaccctcctatactggaggaaggagagagatgttcatacaggaggtgaggggagacattccctgctataagcacttctttctggatccttcaatttctctgggatgcggggactttttcattactggatacgagcattatgtagttttgagaga

SEQ ID NO: 8203 - DNA, 2696 bp, Homo sapiens
  misc_feature (2500)..(2520): n is a, c, g, or t
tcggaccgggttcgcgagttcccctttacaaaatcatttaacctttatgacaggagctactatggtgctcattccacagatgaggtgctgaggtttagtgaactgaatagctgttcacagacagctggagacagagactcagtttgcccatacaaagataattttaaccaatagcattttacaatagaatatcataatgcctatgaattctaaaaacattttattcaaatctctcttttaatattagcacctcttcaacctcttcttgactctaccaccaaaattatcttcctaatctctcttaccctgtaaatttctgtgtgtgtgcgagcgtgtgtggtgtgctgtgtgggctgaagcagcaggcttcagagtgctttatctcttatcagtggtttggctttgtgcatgagaaattcagaggcaactgtataattttaaattccgattaccacaaagaaagagaggcatctgacatcccaaatgccgtggctttgactattttaatggaaatatgttggaacctaggggaaccttccaccacggagatagtgatgaaagaccacaagaaagacattttatctttgagataaaaggcctgttttcgaaggttgtttcttatattataactttttcccaacctgctactagggcactatgcaaatgtatcattccaggagctgtttccttatccttttcatgcctaagatttcttgggacagggggaagagggagaactggtcttgtttaatgaaatttttgacctttcatagagccttgaaaaatcagtatcaggtgctggaatggatctatttacctttttggtcccaaacttcatactacctttggcctttataaaataaagcaagatactctgatctagctgctgccagtttatttcaactgtttccaaataaaaggctgagggattcccttaagtgactttgattagggtctggtaaatgggggtcatttacatttaaaaaaaattccttcctccccaccatgatactcatacttccagagtcatccctagctgatacttttttttttttaagcgatattgagtatgaaaccctggatgagcaaaagggatcttgaccaaagggataaatgtctgataggaacctgccttaccacacacaagcagagatgtcagaatatgtcttttcaaaatatgtttttgttgttgttgttatagttttttgcattccttctacaccagagaatgaagacccagattcttagaaataaagccaaactggcattcatctggtttctcacagcatcagtttgataaaaagaatttcactgtattttttttgtccccatgtattttgctttttccaatacttccaattatttgttggtctcactaactcttcaagcctggtgtggctgtaggaacagtaagcacagtggcggtgttgataactgacgtgatgtgggctaaacagacatgttaagtcaaaactattctctggaggaccatggaatgggcatccctctagactatgggagggtgaagtggaaaactttaatgaatatagacagcagaaagagcctacaggaaacagattctaaggttgaaccacagggtcccctacttcactctcattacacaatgatgctgacctgcagaacctggtatggtctatcaattaagggtcttggaggatcataactttccttttccattaagcttccactaatcccatcctccctgttcccaggcatcctctgagcctgtgtttctctggcaggtggatcaattacttccacatgtcttggaaggcaggctttccacatgtaacataaggaagggcttccttcctgaaagactttgccaagtaactatattcccaaacctacacagaaatgtaagcttactccctgctgtttggaaatgtgctttctttcctgctatatccaatgcataccacaaaaacctctaggtcaggggtgaggaaactttgcctgtaaaggactaaatagtaagtaatctatgctttgtgggatacatagtctctgacacaactactccatcctgctgctgtagtgtaaaatcagaaaacatgtaaatgaatgtatgtggctatgtgacaataaaactttaactacaggaaaaggtggtaagtcagatttggtttccaggtcatagtttgcccacctctgctctaggggtcaaaccttaagcaaactttgggtctatagttgctggatatgcgatgaaaattatccaaagagaaaatgacctaaaggatgttcaaagccagttcaagtttatcccttgggtaacataacaattataaagccacatgtcaggcttttacctaggtagatgtcaccataagggcttttgaaaacctctgtgatactcgaatagtttcccaagacttctatgacttcttgagcagatatcaaatagaagtaaatgttgaacatatttggaaatcagtttttaatttgtaaaaatcttctgaacaatattaacctactnnnnnnnnnnnnnnnnnnnnntgaaggttcatttggattctttgttatgataccagctgtttaatatacccaaaggtgcgattgtctagaaaatgtcatatataaagattagaaagaatctcattttttaaaaagtaggcgttagtagatttttaatgtaaaagctccccgccggcccccaagaattcagctaaaat

SEQ ID NO: 8204 - DNA, 2176 bp, Homo sapiens
  misc_feature (1303)..(1317): n is a, c, g, or t
cccatgtgctgtacggcccggagttcgggatgccgagctcgcggggactcgtggcgggatctcgggctggtgctttggtcggggccggggccggatgctggggccatgatgggcctggcggcgcgccttctgccgtggacggcctgggatggggctggcgagggcctggcacggggctgcttagtgcctggcacgaggcagcacctacagacggatccccgacgctgcccacgggtgctcatcctgggagagaggtgacaagttcagaggtgtcggcagggaggcactctttctcaaactggcctcccgggactcaggagtggagatggcagttggggacagccccctggccgccttaccgggcctttctcaggactccctggactttgaatcctcagggagttctgagccccccgcccaggtaggccgactcctggccagccagaagctgggggaggtgttggagcggtcccgccggctcccaacagctcccaccagcttgtcaggacaacaccgctccctgcggctggcaagcaagcctgagcgtgaagtgccccttggagcagggcaacaggagtccatggaggcagacacagacctagaggcaggcctggaagaagaggcggtggggggcctggggcctggagcctgggcctgcctccccgggcagggtcttcgctatctggaacacctgtgcctggtgctggagcagatggcaaggctccagcagctctacctgcagctgcggatccagaggcccccaggggatcccggcgaggaggagtcgacccgagcccctttaccgtccccgttacacaccccaggcaatcgggggcaggggccatgggagctgctaagccagacagagcacacaggagcaaaggctgcttcacccccaaaggtggaggtgcccagtgccaaccctcccaggctgccagaaaccccagtggagccaacgtaccacttgccatcctcccagggacacaagcgggatatctcccactgggacaaggtcaaggtcctgctcaaccggatctgccggagaagccaccaccaccctgagccccctgcccctcctgatggctctgaccccaggatcgagtccagggacctccctgaaaggcctcagtgccgcccccaccggaagacctttatgccatcattagtggttaagaagcaacgagcaaaaaaacctttctgtaggctgagacctctcggtgcacctggtgaccctgggtggaggggacttgctgtgaagtcttcctcgccctctgccctcttgctgcttctccacattgccagnnnnnnnnnnnnnnncctgccctcctctcttgagtcgagggctgaatctttctcctctaagcagtctggtcaggaaccttggtttcttgagaggcccccaagatgccgcagctccagggctcttcctcctcaccagaaatccctgggcttccacaatgtgaactcactcattgtcaggtgtccgtggagtgtttttggcatggtgacctgtctgggcccagcatgttgcagatgtgtatttatgcgcaatggtatgcatatctctgtgtgactgtcagtgttgcaagctggctggatccaaccatctcttctgaaataatgcatccaaagggttgatattctgggggaggtcactgcagaaggatggaactgacctttattccccagtgggcagttactgagctttcctcctcagagccatgctggcagccctgggacagagaacggtgtggctttggctgcctctgcatggaatcttgccccggactcctgaagactgcacaaggaatgaggaagatcagggacaacctgggaactgaataactttcaaagccagtgctcagcttctctgctccgtactagcgtttacaggtcttaattcaaaccagatgcctgtactagtttttagaccccaagtcaacctttctgagccacagcttcccgctgggaataatgatgcctgccctatctacctcacagacttgttatgaggataaagtgagattaaactgcctcaaagtgctttgtaaaaaaaaaaaaaaaaaaaaaaaaaaaaaaaaaaaaaaaaaaaaaaaaaaaaaaaaaaaaaaaaaaaaaaaaaaaaaaaaaaaaaaaaaaaaaaaaaaaaaaaaaaaaaaaaaaaaaaaaaaaaaaa

SEQ ID NO: 8205 - DNA, 2319 bp, Homo sapiens
  misc_feature (1715)..(1715): n is a, c, g, or t
ggtgttccctcttctgctttctcctcttccgggtctggactggtaagggggcctgtgcccaaaaggggctcctccacctaatgctgtctttaatctgtggctttctgctgctggttaattttttaatttggcttcctcaagccttttggccttgaacttcatgctgatttttatcaaagaactttttattggggcatcagcactagccctatgaatacagtgaaacttggggttccactttcatcagatgtgaccctgtgtgttcctgatgtctttgaatcactagtttctgattcaaaatatggggtaggtggatctgattagtagtcatatgcctgtgtcctggctaggaagtcagaatgaggttatctggaaagttgagcttcctcacacatgggaaggtacttcagatgctggacagccaataagaataacaaaggtccaccagaaccattgccccagtcactgattgaacaaacgtttactgaacactgatgaagcgaagtcctcctcagggacctcttagggaagagggtaactgccctaaagcaggatactcctgggctccttagatatactatccttgaaactattaggcccctgtccagagtacctaataataataatggcaaatatgtatttggtggtctgccatttggaagcaacatctcacttattcaacaactctaaaggtaggtacttttatctccattttaacaacaatgaaatacacttacagttacagacaaacttgctcgagtcacatatctattaagtgtcagtcaagattcagattcaagtctgatgttaaagagtgtctgttcccaatcaatacctctgctgcctctttttacaaactgaactgttggagggcatgtacatatgcataagctgtgggccactgggccatgggccagtgtctgatgagacctctttattgacttgtttgtcccggtgggctgtttctctaccaggcaactgtgaatgggctcatcccttctctgtgcgtacatgattgaaaggagatagccggtttctgtgacatcctcttataacaacctagttttgttcttgagagtgaccagagcaagagaaaagtcaatgaaattttgcagatcttgcaaacctgtggcaataagaaggtattatcctttctgtaccaaggcacaactgattcctaagcgagggggatatgtgttctgagatgttaatgttagtgatagactgttttcaacaccttggtaaacatttcttttgactgttagcaaaagctgccttaacagtcttggcttttagaaatgccccttcattcattagatgtgtatggaacacatcttatgccaagcactctgctaggagctgggtatacagagaagaaaggcattcctgctctcatgatgttcatggtcttctgcggaagagaccagaaaaaaagtattacaatgtagaatgaaataagaatgacagggtattttggcagcaaggaggagggcactttaactcaaactgggcagtggaagaagtaaaaaaaaacattgaaagaaatcctgaaggataagcaggagttaagaagagtggatgaagccctccaagggtaaaagcatggtttattcagagcactgcaagtgttttagtatggcccacatgtaaagcttacagaggaacaaagagagaaaggcaagagcaggaagtgaagggtcctgtgtatactgggnttacttgttgagttggagaactattgccgtattcctctgctaagctcagggtgcattcgtggaaaccctactgcaactggcccattgtgcatacaaagctggaactgagatgtgaacagatttgcattgccttgatcaccttccgtgggaaatatagctaggcccacttattggtaggagctactgacatgttaaaactaggttaaactgaattggaagtaatggtgtatttggaatcatggctgactgattccattacatgttctagcatgataccagtctgaggttattccccttgaaccaccgacttagtagagtttaatgcacaatgtgatggtcttagttccttgtactgttcttcagtgtcaaagttgttcaactaccagttaagttttttgggctttgtttctcagtagtgacaataaatttgtgttgatctatttacaccttttggactgaacaccttagcaatcattgatattttaagcctacaggaagtgcccatgcgtaaaccaatgtggctcacactaagttctgatcccatgattttggtctcattaataccgtgctataaataaagttagctaaatcttttgaaactgca

SEQ ID NO: 8206 - DNA, 2284 bp, Homo sapiens
acttccggagccgggcgcggggccgagggctgggcccccctcttcccttccctcctccagcggctgcgctccctccggcgccctcggccccggggcggaggcggcccccgccgctgggaagcgagcgccgcggctctttctacgcgcgcgcgcgcgttgaccgcctcggggtcgcggcccttgtccgggggttgctggggtcctcaggcctatggctgccgaggcgggcgtcgtgggagctggggcctcccctgatggggattggagagaccaggcctgtgggcttctgctacacgtgcatttgtcttcccgactgggtcgcgcagcccctgtacgtacaggtcgtcatcttagaacagtgtttgaagatactgtggaggagcgtgtcatcaatgaagaatataaaatctggaagaagaatacaccgtttctatatgacctggttatgacccatgctcttcagtggcccagtcttaccgttcagtggcttcctgaagtgactaaacctgaaggaaaagattatgcccttcattggctagtgctggggactcatacgtctgatgagcagaatcatctggtggttgctcgagtacatattcccaatgatgatgcacagtttgatgcttcccattgtgacagtgacaagggtgaatttggtggctttggttctgtaacaggaaaaattgaatgtgaaattaaaatcaatcacgaaggagaagtaaaccgtgctcgttacatgccgcagaatcctcacatcattgctacaaaaacaccatcttctgatgtgttggtttttgactatacaaaacaccctgctaaaccagacccaagtggagaatgtaatcctgatctcagattaagaggtcaccagaaggaaggctatggtctctcctggaattcaaatttgagtggacatctcctaagtgcatctgatgaccatactgtttgtctgtgggatataaacgcaggaccaaaagaaggcaaaattgtggatgctaaagccatctttactggccactcagctgttgtagaggatgtggcctggcacctgctgcacgagtcattgtttggatctgttgctgatgatcagaaacttatgatatgggacaccaggtccaataccacctccaagccgagtcacttggtggatgcgcacactgccgaagtcaactgcctctcattcaatccctacagcgaatttattctagccaccggctctgcggataagaccgtagctttatgggatctgcgtaacttaaaattaaaactccataccttcgaatctcatacagatgaaattttccaggtccactggtctccacataatgaaactattctggcttcaagtggtactgaccgccgcctgaatgtgtgggatttaagtaaaattggggaagaacaatcagcagaagatgcagaagatgggcctccagaactcctgtttattcatggaggacacactgctaagatttcagattttagctggaaccccaatgagccttgggtcatttgctcagtgtctgaggataacatcatgcagatatggcaaatggctgaaaatatttacaatgatgaagagtcagatgtcacgacatccgaactggagggacaaggatcttaaacccaaagtacgagaaatgtttctgttgaatgtaatgctacatgaatgcttgatttatcaagcgccaaaaaggcattgtatagtaggaaatgtaagtggggtggcttatggcttctttatcctctgattctagcactttcaagtgagctgttgcgtactgtatcatattgtagctattagggaagagaagaatgttgcttaagaaagaacatcaccattgattttaaatacaagtagcagggtattgcctttgattcaactgttttaagtcctcattttctcaaactaagtgcttgctgttcccaaatatgcaagaataacttttacactttttccttccaacacttcttgattggctttgcagaaataaagttttaaaataaaaaaaaaaaaaaaaaaaaagatcgacagagaacgcagacagccacaaaagacaatgagcagagaaacaacaatttgttgtggcggggcctggcgccgcagagagagttattgaacacacttggtgggggggcgcggcgccccaggtgaagttgaacgtcgcccggagtcttcccggagaatcgggtcagacagggtgggtttccacaaaaaaagcgcggggacggtttcgacaacaagagttggacacagggtataagggacagagataaacccgcctgt

SEQ ID NO: 8207 - DNA, 2166 bp, Homo sapiens
tttttttttttttttttttttttttttttttttttttttttttttttttttttttttttttttgatataacaaaacctttattctcagaaaacaggaaaaacaaaattaaaaaacaaaaccaataatttctatctggcccctgccccagccctcccacccacccacatatcctccttttggggggaccatgatgcatgcatagggatgggagctgaaggaaactgtgttccttgggcagaaaagagtccttgggtctaggtgttctcctccaagttgatatccctcccagccttgcccaccctccagacacaccaagaaggaggaattctggagcagtgccagaaggactgccctgaagctccttggggaataggcggctgagtcagcaccacccccatggttttcaccagttacagctcatcttcatccagcttggcaagtctggcttggcagggaggggtttttggagttggagagactggaggagagtcatggggagcctgggggatgtcaccaagggcctgtttatccagtggcaagagggctctggccacctcccctttgggtgacagcagcagagaggggagagagccattgatgggtgtgtgtgtgctgccctgggcctgatctccaagccgaattcttccagggctccccactccaggccctcttggccgccccaggctgttggtctggctctcccgtctctggtactcaatgggtgactgcaatgcgttgaggaagtcccgttggctctccaagatctgagccacatgcttgatccaggcctgactgatagcagggtctgcagcctgcaggacatagcgctggatcccaccctctggccctctggaggtcagtgcaaagcggcaagggtcaccttggaggttcccctccagtcccaggcagctcaccttaatgctgttcttgtatacatatccaggctgtgttccacctctcactcctcctcccagggcttcactgaagatgatgatttgctcaaagaggaagacgcgcctctctcgacctcgggaagatagcagccctccagcctcaggctcggtgacccagaaagtgtcctggcccaagagcttcccctgagcagtcagtttgccctcaaatccccgcaatctccccagcgtcatcatatcgttgcagcgcttgggcacaaagcacatgacctccacagcttgctctaggtctgcagtatccatcccagctctattgtaatacttgagaaaatccttgagcagcagctggtatttcatgatccgctgcacaggtttgatgaggaggtcgttcagctgcaggcggtgccccagctgctgccggagctcctcaaagtagctgtccccaaactctgacaccacatgctctgacttgggcttattctgacagtacaccacatacatatgcagccggcgctcgtgtttgatgaatagctgagccagccaatcaggatctttcagacaccgttgtagctcttgcaagaaatagtctcggtgccactcatagatttgctggatattcccaaacacaatcctgtcacggcctcgaagactctcggggaccccctgagcagccatggtggccatataaccctccacaatctgccccaagtcgtccacgtacattttctctgtttctaccagttcactcaggacatacatactcctttccagagccttcttcttctgttcctcctcactctcaggggcttgggacaaagtctcctcttcaggtggctgcgtcttatctccagggccctccaacagtgtggtcagcaaggtcagttccggcagctcctctcctgtggctagagctggctccaacatccagttctcatatggtcctgcctgaccactgtctgcctcagtttccacactgagacaatgtttggaatgatccaaccatctcctcaggccactgacgggccctggggggccttgccccagctccagactcagggtccccagggaactcccagggtcttctcttcatgatgctcagcctctctctccaagggctcactctcttgccatcctcatttgagttggccaggatagaaaatttcaccagggcacccccttacccccccgggcgaagcagcagccgcattttgccagcacttttcggatcacacggggacaggcacagcgaccccc

SEQ ID NO: 8208 - DNA, 1833 bp, Homo sapiens
gcggccgcgcaggtgcctgccctttgcgcctgcgcccagctcgccctgcctagccaggtgcgccccgccccctgcctgcccggccaccttcgggaggcacggacgaataggcgttcgccattggctctggcgacctccgcgcgttgggaggtgtagcgcggctctgaacgcgctgagggccgttgagtgtcgcaggcggcgagggcgcgagtgaggagcagacccaggcatcgcgcgccgagaaggccgggcgtccccacactgaaggtccggaaaggcgacttccgggggctttggcacctggcggaccctcccggagcgtcggcacctgaacgcgaggcgctccattgcgcgtgcgcgttgaggggcttcccgcacctgatcgcgagaccccaacggctggtggcgtcgcctgcgcgtctcggctgagctggccatggcgcagctgtgcgggctgaggcggagccgggcgtttctcgccctgctgggatcgctgctcctctctggggtcctggcggccgaccgagaacgcagcatccacgacttctgcctggtgtcgaaggtggtgggcagatgccgggcctccatgcctaggtggtggtacaatgtcactgacggatcctgccagctgtttgtgtatgggggctgtgacggaaacagcaataattacctgaccaaggaggagtgcctcaagaaatgtgccactgtcacagagaatgccacgggtgacctggccaccagcaggaatgcagcggattcctctgtcccaagtgctcccagaaggcaggattctgaagaccactccagcgatatgttcaactatgaagaatactgcaccgccaacgcagtcactgggccttgccgtgcatccttcccacgctggtactttgacgtggagaggaactcctgcaataacttcatctatggaggctgccggggcaataagaacagctaccgctctgaggaggcctgcatgctccgctgcttccgccagcaggagaatcctcccctgccccttggctcaaaggtggtggttctggcggggctgttcgtgatggtgttgatcctcttcctgggagcctccatggtctacctgatccgggtggcacggaggaaccaggagcgtgccctgcgcaccgtctggagctccggagatgacaaggagcagctggtgaagaacacatatgtcctgtgaccgccctgtcgccaagaggactggggaagggaggggagactatgtgtgagctttttttaaatagagggattgactcggatttgagtgatcattagggctgaggtctgtttctctgggaggtaggacggctgcttcctggtctggcagggatgggtttgctttggaaatcctctaggaggctcctcctcgcatggcctgcagtctggcagcagccccgagttgtttcctcgctgatcgatttctttcctccaggtagagttttctttgcttatgttgaattccattgcctcttttctcatcacagaagtgatgttggaatcgtttcttttgtttgtctgatttatggtttttttaagtataaacaaaagttttttattagcattctgaaagaaggaaagtaaaatgtacaagtttaataaaaaggggccttcccctttagaataaaaaaaaaaaaaaaaaatttcaaaaaaaaaaaaaaaaaaattcaaccctaccaaaatgatcacaagacactatctgaggtgtcccattctagaaatagacccctcaaaatagcgtctttcagatctttttgaatgaatccacaagatgaaataaatgtcctattactgaaaaaaaaaaaaaaatgggcggacgct

SEQ ID NO: 8209 - DNA, 4263 bp, Homo sapiens
  misc_feature (1329)..(1353): n is a, c, g, or t
  misc_feature (4133)..(4133): n is a, c, g, or t
cccacgcgtccgcggctgcgcgggagattcgctggacgatcgcaagcgcggaggccgggcgggcgcgcgcgccatggagcggctgcgggacgtgcgggagcggctgcaggcgtgggagcgcgcgttccgacggcagcgcgggcggcgatggagcggctgcgggacgtgcgggagcggctgcaggcgtgggagcgcgcgttccgacggcagcgcgggcggcgaccgagccaggacgacgtggaggcggcgccggaggagacccgcgcgctctaccgggagtaccgcactctgaagcgtaccacgggccaggccggcggcgggctccgcagctccgagtcgctccccgcggcggccgaagaggcgccagagccccgctgctgggggccccatctgaatcgggctgcgaccaagagtccacagcctacgccagggcggagccgccagggctcggtgccggactacgggcagcggctcaaggccaatctgaaaggcaccctgcaggccggaccagccctgggccgcagaccgtggcctctaggaagagcctcatctaaggcatccaccccaaagcccccaggtacagggcctgtcccctcctttgcagaaaaagtcagtgatgagcctccacagctccctgagccccagccaaggccaggccggctccagcatctgcaggcatccctgagccagcggctgggctccctagatcctggctggttacagcgatgtcacagtgaggtcccagattttctgggggcccccaaagcctgcaggcctgatctaggctcagaggaatcacaacttctgatccctggtgagtcggctgtccttggtcctggtgctggctcccagggcccagaggcttcagccttccaagaagtcagcatccgtgtggggagcccccagcccagcagcagtggaggcgagaagcggagatggaacgaggagccctgggagagccccgcacaggtccagcaggagagcagccaagctggacccccatcggagggggctggggctgtagcagttgaggaagaccctccaggggaacctgtacaggcacagccacctcagccctgcagcagcccatcgaaccccaggtaccacggactcagcccctccagtcaagctagggctgggaaggctgagggcacagcccccctgcacatcttccctcggctggcccaatgaacgggggccaataacgtacggggtcaactttgaagccgaaaacctacgtgcggggccgggcactccgtagcaggctcctccgcaagcaggcatggaagcagaagtggcggaagaaaggggagtgttttgggcgggaannnnnnnnnnnnnnnnnnnnnnnnngcttgtttcctgaacgagcagttcgatcactgggcagcccagtgtccccggccagcaagtgaggaagacacagatgctgttgggcctgagccactggttccttcaccacaacctgtacctgaggtgcccagcctggaccccaccgtgctgccactctactccctgtgggccctcagggcagttggcaggcacgaggctgaggtgttccaggccctggagcagctggggcaccaagcctttcgccctgggcaggagcgtgcagtcatgcggatcctgtctggcatctccacgctgctggtgctgcctacaggtgccggcaagtccctgtgctaccagctcccagcgctgctctacagccggcgcagcccctgcctcacgttggtcgtctctcccctgctgtcactcatggatgaccaggtgtctggcctgccaccgtgtctcaagcggccggcacgaggctcgggcatgaccaggaagcaacgggaatctgtcctgcagaagattcgggcagcccaggtacacgtgctgatgctgacacctgaggcactggtgggggcgggaggcctccctccagccgcacagctgcctccagttgcttttgcctgcattgatgaggcccactgcctctcccagtggtcccacaacttccggccctgctacctgcgcgtctgcaaggtgcttcgggagcgcatgggcgtgcactgcttcctgggcctcacagccacagccacacgccgcactgccagtgacgtggcacagcacctggctgtggctgaagagcctgacctccacgggccagccccagttcccaccaacctgcacctttccgtgtccatggacagggacacagaccaggcactgttgacgctgctgcaaggcaaacgttttcaaaacctcgattccattatcatttactgcaaccggcgcgaggacacagagcggatcgctgcgctcctccgaacctgcctgcacgcagcctgggtcccagggtctggaggtcgtgcccccaaaaccacagccgaggcctaccacgcgggcatgtgcagccgggaacggcggcgggtacagcgagccttcatgcagggccagttgcgggtggtggtggccacggtggcctttgggatggggctggaccggccagatgtgcgggctgtgctgcatctggggctgcccccaagcttcgagagctacgtgcaggccgtgggccgggccgggcgtgacgggcagcctgcccactgccacctcttcctgcagccccagggcgaagacctgcgagagctgcgcagacatgtgcacgccgacagcacggacttacctggctgagaagaggctggtacagcgcgtgttcccagcctgcacctgcacctgcaccaggccgccctcggagcaggaaggggccgtgggtggggagaggcctgtgcccaagtacccccctcaagaggctgagcagcttagccaccaagcagccccaggacccagaagggtctgcatgggccatgagcgggcactcccaatacagcttaccgtacaggctttggacatgccggaggaggccatcgagactttgctgtgctacctggagctgcacccacaccactggctggagctgctggcgaccacctatacccattgccgtctgaactgccctgggggccctgcccagctccaggccctggcccacaggtgtccccctttggctgtgtgcttggcccagcagctggccctgaggaaccccggcgaaggcagcagctccgtggagtttgacatggtcaagctggtggactccatgggctgggagctggcctctgtgcggcgggctctctgccagctgcagtgggaccacgagcccaggacaggtgtgcggcgtgggacaggggtgcttgtggagttcagtgagctggccttccaccttcgcagcccgggggacctgaccgctgaggagaaggaccagatatgtgacttcctctatggccgtgtgcaggcccgggagcgccaggccctggcccgtctgcgcagaaccttccaggcctttcacagcgtagccttccccagctgcgggccctgcctggagcagcaggatgaggagcgcagcaccaggctcaaggacctgctcggccgctactttgaggaagaggaagggcaggagccgggaggcatggaggacgcacagggccccgagccagggcaggccagactccaggattgggaggaccaggtccgctgcgacatccgccagttcctgtccctgaggccagaggagaagttctccagcagggctgtggcccgcatcttccacggcatcggaagcccctgctacccggcccaggtgtacgggcaggaccgacgcttttggagaaaatacctgcacctgagcttccatgccctggtgggcctggccacggaagagctcctgcaggtggcccgctgactgcactgcattgggggatgtcgggtagagctggggttgtcagaggctagggcagtgactgaggacctgggcaaaacctgccacagggtgtgggaacgaggaggctccaaaatgcagaataaaaaatgctcactttgtttttaaaaaaaaaaaaaaaaaaaaaaaaaaaaattccaaaaaaaaagggcggggccgctctaaaagtatcccctcgagggggccccaagctttacggcgttacccacaccttttctttggaacaaaagggggtcccccctataaggtgagggccggaatttttataagcctaagggccccttgggcccggcccgtttttacacaaaccttccgngggaactggggggaaaaaactctggccctagccctgtggggagaatcttttttgttgggagagggagaacccctctaacttctccctgggggggggggggggggcaacaatatataattgtgggcaaact

SEQ ID NO: 8210 - DNA, 1398 bp, Homo sapiens
  misc_feature (535)..(535): n is a, c, g, or t
  misc_feature (590)..(590): n is a, c, g, or t
ggtactgaggaacaggatgacgggcgtcggtgacacttcgggaaacagctataacggggcgcaggcttagagagggggaaatatgttatacgggggcgtgtgttttcacatgcgctatcatcatcacctctagccctggctactttcagcccctagctggcatcttgctcaccgccctgattctgttcctcggctccactgcttcaggtcacttcccatggctgcagtccactggtgggacaagagcaaagcccactgccagtaagaaggccaaagggcccttccatcctagccctctgcaggcatgcccttccttcccttgggcaggaaagccagcagccccagactgcccaaaaacttgcccaccagaccaagggcagtgccccaaggcccctgtctggaggaaatggcctagctatttgatgagaagaccaaaccccacatcctcctttcccctctctctagaatcatctcgcaccacccagttacacttgaattaagatctgcgctcaaatctcctcccacctctctcccngcttttgccttgctctgttcctctttggtcccaagagcagcagccgcagcccccncgtgatcctccctagcataaatttcccaaacagtccacaggtcccatgcccactttgcgtctgcactgtgatcgtgacaaatcttccctcctcaccagctagtctggggtttcctctccctgccccaggccagaactgccttcttcatttccacccacgctcccagcctcttagctgaaagcacaaatggtgaaatcagtagtctcgctccatctctaatagactaaacctaaatgcctctaggacggactgttgctatccaagcgtttggtgttaccttctcctgggaggtcctgctgcaactcaagttccacaggatggtcaagctgtcagacatccaagtttacatcattgtaattattactggtatttacaatttgcaagagttttgggttagtttttttttttttttgctttgtttttgtacaaaagagtctaacattttttgccaaacagatatatatttaatgaaaagaagagatacataaatgtgtgaatttccagtttttttttaattattttaatcccaaacatcttcctgaaaataacattcccttaaacatgctgtggaataaaatggattgtgatgaaaaaaaaaaaaaaaaatttgatttaataacttaggttcttgctactcagtcatcagcatcacctgggagcttgttggagatgccagctcttcagctccaccctagacctgctgaattgggtgatgtttatgtacattggcttgaaaaacactgctgtgggaaaccctccaccattggtaggtcaccataggctctgagcatcagtggagaatgttact

SEQ ID NO: 8211 - DNA, 3423 bp, Homo sapiens
  misc_feature (2219)..(2238): n is a, c, g, or t
actgtaaatatggattttttttttttttggtcttatttctgtccctttccctggtttgttatcgtaacctgtagtgccaactctgcttccagaggggtagtgcaggatgaaatgctgaccctgatgttgcttctcattcataaataagtagaaagttgtttctccagtcttttgggaacacaggacttaaaagtcacatcatgtgtagatattacaagcagcattaccaagacatggcaaaaagagtttgtctgaattgtaatgttgcgtttgtgaacctattctgggattttcagaggtacaaggttagaatgctacaatgttaccactgtgccttccaatgtttatatcatcggaaacataacataatcaaagtggctgtgatttaacaaaatgattaaagtgttacctacctgtgtagccgaagtagtgtgcagtgaggcgtttctgaatacatggtcagatttttggaaaaaaacaaaaacaaaaaaaacaagtaaagttcaaaaaccgtcaaatgagaaaattgcaagtagtgtgacagagctgattgattttgttgctttcttgattttttttttcaaaatgggtttactaaaatgtagatgacttaactgcctcctccttcgtctgaaaaatgccaatattcaatcatcatgcagcattataacaagccttataagtcctaaagcattaagttgcacttttttgaggaggggtagtgcagtatttctctggccagtatgaatgaagtttatacttaccatatttgatagaaacatagatcaagctatggcacagcgactcatcagatagctagctttgacgtctgggcacaattgaaccaacttccatcgtgaatctttataatgattgactttggtgtatagtgcagtaaacaaatagtgctcctagttaagtatttgtcagcatccttttgtctctaacttgtttctatttttacagccacacaattcttggcatgtattaagaaaaaaaaaaatccctgttcaagtagtttttccacctatcagcactgagtaaatgccataaatccattgaaatggtctaaatgttccatctgttctcctgttttgccagttatatagtaatgaaatacatttgtaaattttatgcaacaaatggcaaacgtatcattattttgaaattgtgtatgtaaaagttatatttttacatgtagactcttgttattatgtgttttaatacattgtatcagtttttgtttttttttaaaaactgtggtttaaaaagaagtctcatttaaatgaaatagctacaagaatcagaattttatgttcatttctgaaaatgtaagaacaaataagatagttaccacgtggtcatcttttacaaacccataaacattttgattagctgtgtgtgtgttgaaaaactgtaaatatgttcagtagcgataaaactaaaataactttgatttgttgataagttcctaaaatgtggaggtggattaaaaccttaggagaatagcagaaatcaaacttcatgaaaagttattttggggctttcctgtgaaatgtatgaacaaagaggctcagagaaggacatggaagacaataatgtatactctctcctcctccctgaataatgaaaaccatgtgtatttgttccctccgtatgttaaagatttccttttagtggtacattctgcactcattttgtatagtctaccaaggcgggtatccctaggaacaatattatataggaagcaggtatactctgatcacattcaggataagtgtacagaagaaaatacggtgtttactctttagggaactggaaacactccctgcattgatgtacattttaagaatggcacttttgatacatgttatcataaaggtgcttaatagagctgaattaaagtttttcaaatctgtaaacaaagcaaaaaagtaaattgtagtcatttgattattttttaaattggtgctttatattttgttctcactcagagtaaaagctgcaatttattgttcaccagctttgatgtattcattactcagtaatgcaatacctctattgttgaattccctttggaaataagtgaaaattctaacggccactgaaagctgctcgctaggttttgcttggtggagaaacataatctgcacctatccatattaattgggttgtatccccattaaaaaaaaaaaaaaaggaaaaaaaaaaaaaaaaannnnnnnnnnnnnnnnnnnngttgttgttttgtaattatcaaacccaggtaagatattggtatcctgcactggattttcaaatgaagttcagcagaagacagttaagattaaagtactatacaaaaatttcaaaagggtccatactacgctatctgtatgacgacacttaggctggggatctctttcagaaactcggactttaaaagcaacttggagcagttgatccacctccacattcaagtaatttatgaatatgcagaatagggatctgttcatctagaaatttttaccatttgtcttctgtgtagctgcaaggaacactaatgtttatacaactgtcagtccacccagtggtgcaactggttctgattcagtcttccgattcctttttatttttcactttttcctatttctgaatttttttttttatttgtgatcttgattttgatgaggggttggggagtggggagggagtcgaaccaagacttggagttaagaggattttcatcttttgcatccaacaggcagaatatgatctgtgtccaaaagtgaacttgagtcaggaatgaatcaatttcagcataaacaagcacaaaaatttagtctgctggctgactggaagcaaaaaagtcaagatggaatatgatgaattccaacacaatggggcaccaaggcctttaggcctctctttttattttgctttggttttgtttgtttttctttagagacatgctctttctcatgggacttgaagtggactcatctttgtgcagtgctggttttgccatactcatttcaagtattatagacatatgtaatggtgaaaatatatgaactgtggcctttttcattcttgttacttgtgatgcaattaagtgaagataagaaaaaaaaaaaaaagcagagatttaccatgtatcagtgcctggctttttgttataaagctttgtttgtctagtgctcttttgctataaaatagactgtagtacaccctagtaggaaaaaaaaaaaactaattttaaaaataaaaaatatattttggctaattttttcccaaggaccaatccttttttatccgtgaaatatttccaaaaaaattggtccaaattctggaaaatttttttttggaattaaaattccggggcctcccctggaaaaataaaaaccctttttttacaccactccctaaaaaaaaaaaaaaaaa

SEQ ID NO: 8212 - DNA, 1320 bp, Homo sapiens
gggtggtgtcagaggccgagatgggcaacattgctgtagagtgcgagagcacaactgaggtaagcgcggcgtgtggtcccgtcaagtaaagaatgtgtaagcgcatgcaaagaattttaaatatggaggcccccattttgggacccagcctgtggtttaaaaaggggagatcgaggatttccttaaagggaaattggggagaggaaaggtccttgatcaatcatcaaccttctactggctgcttcttaatgataaagggtgatggactcaagacaggggctggaccagggagatactggacctacttgggtccagtaatctagacaggtgggcaccaggcaggaagtgccaaacgacccaaattccataacagcgtcctggccaagagactgggtcactgagtcattatttagtagtgaaaaccactcaggaattggacgccgaggtgacggttctcagggagtatctggagatcagcagtggtccagaggagctccaggcccttctgggcagctacctgaagaattgctgcttaggatggaatcatgcccagcctttgtttctaaaattaactgtgtattttttatattctccagtgggaaaacagccaaaaccatttgatctctcaattctagtgaggttccagcaggtagtctcctctgagtattgctgggaggtattagacagtggccagtgcataaagaaggaggcttcacttcttcaagggagactgagaattttcctttaaaaatactcctatcacagccaaaccattttcttccagtgctgcatcctcaaagttttcaaatttgactgcgttccaatgcactaagtgcagctgatttatctgtagaatcttcaaattccacgaggaaagagtacccattattccagacgtggaggcaggtggctgggtcataagagatggtcagtggttttaagccgggatcataaacactgtccctccaccgaatgttgatgggtgactggcgatcgcccccaggaaccaggtccacgctctcccagagtggatgcactgagccacacctctcttttctggccagtggtacccgaggatcccgcacgcggccatcttggccacgccccctcacgtttagccacgtccctacgcagcaaacgtcatttcgtcattccaggttacgcccctatcagtccccattctgtccccgacccaggctgaaatctcgcactggccacgcttccccagcgccggagtccacacctgctctgcgctctggctacacatctcctgtcgctgccacgcgcctgcacgctaacttgccgacgcctctgccctcc

SEQ ID NO: 8213 - DNA, 2368 bp, Homo sapiens
  misc_feature (30)..(36): n is a, c, g, or t
agcggatcctggccgctgagcgcagcggcnnnnnnngagcggagctcgcgtcctgccgcagtccctccgccgctagtcggagcgagcgcgagtgaggagacccccgccgggccactggcacttgcttctgcggcgagtcccacccacgaccgcagcccagcaactcgcaaacgcaacctgaagcctgggctgcgcagtgtgggagggcttcgcgatcttgggggacccattccgaacttgcagaggaccgtagctctcctggcctggagagtgtgaacaggattgtggactcttccaagattcacaatgatatggtgaatccaaagactggaaccaaaaagatttactcagtgctttagttttaacaacagtaaattgtctaccaacacccatcatggctaaaagtgcggaggtcaaactggcaatatttgggagagcaggcgtgggcaagtcagctcttgtagtgagatttctgaccaaacggttcatctgggaatatgatcccaccctcgaatcaacctaccgacaccaagcaaccatcgatgatgaagttgtttccatggagatactagacactgctggtcaagtgaagatacagttcagggaggggcacatgcgatggggggaaggctttgtgctggtctacgacattactgaccgaggaagttttgaggaagtgctgccacttaagaacatcctagatgagatcaaaaagcccaagaatgtgactctcatcttggttggaaacaaagctgacttggaccactccaggcaggttagcacagaagaaggagagaagctggccacagaattggcttgtgctttttacgagtgctctgcctgcactggagaagggaacatcacagagatattctatgaattgtgtcgagaggtgcgtcgccggaggatggtgcagggcaagacgaggcgacgcagctccaccacgcatgtcaagcaagccattaacaagatgctcaccaaaatcagtagttaggcagcccagctgaggtggaccaactaattggaaacactcttccccttctgttcccctttcaaaaataaaacaaaatattgcattctttgtttggattctgagaaatgtctgggcttcccattgtttctggcctctaataggttgggaagttttagcgtgttttatgcaatttcagtgctaacaatttcttcctttcctgcttgaataagatacactctaatggcatttgaacatgtaatcaccagagattctgaaatgactggtttatgttaagctatttttaggcatcttcaccttgctttaagtaggttgaagtttttgcaaaggcatttaaaaattcaatttcttgtcagatactacaaataattttcttaaaagtctaagatagcagaaaatacagtaaaaacacaggagaagaagctgagctattggaacaggaaatagaaggaactctagtttctgtttgaagtgaggattttctgaattatctaatatcatctaggttttctttaaaattttattttgttcttcagttcaagcatcttctcactaatgtttttcactataacagagaattcatttcaatttgagttggttctctcaatgatctattgatcattacaccctaactctccttccttggctcaaacaatattttccctataacaaaggcaataggacacaaaattcacatcctgctgggccttttttcatcaagtcagggtgatataaaaacattggaagtcttttcaccaaaccctgactttattgaatgctagtagaagatgtagaattagagacatctgatttgtttatcaccttagcagaaaaaccacagtccaaaagacaagcaaattaagaatggagcttaaccatgcctccattgggaagtctagactttgagccaggtacagtaagaaaaattagcctctgattcattaagtttgccacatgacttattttgatattttggatacattaactcacttaggagaattcagaaaagaatgggtgattaaagttcattacagctgaataaatgtgtctaaaacagactcttgtattctgaaagtacagtctacaactgataaaaccttatgattcttttctcccccattatgcccctatatatatcaagatttgggtactttattttagtagaaaatatatatcttttacatatgtatgtatttataaatgcatagatatatgtataaaaatttgtaagcgttagcggcattaattcaccaatgcatttggacaacttgatgtaactgactttattttatgtgactataataaaaagcataattttctcattctgtcaaaaaaaaaaaaaaaaaaaaaaaaaagagcacacaaacaggaaaaaca

SEQ ID NO: 8214 - DNA, 1971 bp, Homo sapiens; identical to SEQ ID NO: 5645

SEQ ID NO: 8215 - DNA, 1266 bp, Homo sapiens
  misc_feature (1247)..(1247): n is a, c, g, or t
agcggataagtgtatactggtgaccgatactaggattaaggttttgccaggcttaaggctggactttggagctggccaaggggtggggtttgtggctagggctggggtttgtggctggggctgggttttgtggcagggatccaagcaggagctggtgcccctgactgatgctaaggctggacatggagctggtgatggtgctagcactggctgaggttgggtgcaaggcctgtatttggggatggtgcaggttttgggggccgagttggatttaggctagggttggagctggattggtgtcttgggttgacttaggttgtggaagatgctgaggtttaggattgagtttgggaaagtactaaaccaatgcccttctcatccctgtttccccaggctcctggctgtttatctgccccaaaggagaagcctcatggggttgacataggtcctttctgccatctctgttccagctgctgtcagggattaacaacagagtgtaggggagattaactgcctcccttccaatagacactatcagcagggacagatgtgtgggagtgcagggctgcagagggtatggggggaggaggctgctaaaccctatcccccagcctcccccctgccctgaagatcttccatttgcttccactcagctggaggctcaagagggcttgatggctgtcccctgcccccctccttttgttttgtacacagagaccaagaggcctcagtttagcaccttagtacctccgctgcttcacttgctttagccaaagccataaaaaacctgcaacgtagagaaaataatgcagataccctgactagccagccctctactcctccaaccttttccaagatatgcaatggcctttgtgcctgcccaaaggcttcgccccctccagtgcatgaggaaccctctttcctccgctcagagatgctgcttcatttacccaggaggtcatattctttatatatattttttgttgcaaagtgtctctctagagaaactctatatattattcgaatttttaaattatttgtttatatataaaagaaaagctcaattggcaaaaaagtcctgtgctgtgctgtgcccacagtctgtagtttgcctttcctgtgttggaagtgtcgtgagtcctgctggtcacccaccagcctggtccggcctccactctgaagcagggttgagcctgctgtgctctcagacgcggagccgttccaataaagcagagtggcagagcccncaaaaaaaaaaaaaaaaaa

SEQ ID NO: 8216 - DNA, 2657 bp, Homo sapiens
  misc_feature (391)..(425): n is a, c, g, or t
agaacgtgcttgtcagctcttcctgatctgttgtagaactgtgatcgctcagggagtcagaggcaaacctggtggcccagtggcaagcaaagccatggtggtcgcagctctccttactgctactacttggagtttattatgaggccccttgaggctgtgccctatgttgggtacatccaagcttctggttcatcccttaggaagattttgtgtctgagaaggcagcgtaaagtctggcaacactttgccgagcgtgaattcgcccacttgacgggctgtggaaaagggggttagtagatgagtgtgggaaacactgggttcaagaaagttagttggatttttcagtcgcaggacttctcaagagcttcactgtgcaatgcgcagtgtgacnnnnnnnnnnnnnnnnnnnnnnnnnnnnnnnnnnnctttttgttttgttttgtttttgttttagagccggggtttcaccctgtcacccaggctagtctcaaacttctgggctgaagcattccttccacctctgcctcccgcgtagctgggaatagaggtatatgccagcacacctggcctcaaaccttttttttttttttttgagacagagtctggctctgtcacccaggctggcatgcagtgatgcaatcttggctcactgcaacctctgcctcctgggtccaagtgattctcctgcctcagcctcccgagtagccgggattacagacgcccaccaccacgcccaacttacttatttattttttccccctgagacggagtcttgctcgattgcccagagctggagtgcagtggcgcgatctcagctcactgcaacctctgcctcccaggttcaagcaattctcctgcctcagcttcccgagtagctgggattacaggtgtgccaccatgcccggctaatttcttttctttttttttttttttttgagatagagtcttactctgtagcccaagctggagtgcagtggcacgatcttgactcactgcaacctctgcctcccagggtcaagcagttctcctgccttagcctcccaagtagctgggactacaggcacatgccataatgtccagctaatttttttttgtattttagtagagatggagttttaccttgttgcccaggctggttgcaaactcctgagctcaagcaatctgcccgcctcagcctcccaaagtgctgggattacaggcgtgagccactgcgcccggcctaatttttgtatttttagtagagatggggttttaccatgttggccaggctggtctcaagactcctaacctcaagtgatccgcccacctcagcctcccaaagtgctaggattacagatgtgagccactgcacctgtcctgtgcctgtgctcttccagagcaaagttccccactggtgcatggaggcggcatcacatttgtgttcagatacggatcccctcagtcatcagggcccctgggcagggtccccagaagctcgccactggccttggcagtgtgctgccgatactttcttttgcggtggcacgaagatgacctgcagctctgctgtagagcaagtgttcatggaaactgagaatgaaagttcaaagtgagaccagcgcacgcaccggtgtcttcttctggcctctgacccgtctcatctctttgccaggctggaagtacacttgttggaggcttcagtgacgacaggcagttgtcacaaaaactcactcatcaacttcttagtgaatttgacaggcaagaagatgacattcgcttagtgacattatgtgtgacagaattaaatgaccgggaagaaaacgaaaaccactttccagtaatatatggcattgctgtcaacattaagactgcagagatttacagagcatcctttcaagatcggggtccggaggagcagcttcgtgctgcgcgaactttagcaggaggaccaatgattagcatttatgatgcagagacagaacaacttcgtataggaccgtactcctggacaccatttccacatgtggatttctggttgcaccaagatgacaagcaaatactagagaatctttccacttcgcctctggctgagccaccccactttgttgaacatattagatctaccttgatgtttttaaaaaaacacccatctccagctcacacactgttttctggaaataaagccctactctacaaaaaaaatgaagatggcttgtgggaaaagatctcttctccaggaagttaaaaaacatgaattaccaaagaaagcaccttcttggcctgacagaccattggtggggctggcacgaatccagatttggatcctacatctgttgggtcttaggcctccttccctcctcagtgtctttcaaatgactttcatcaaatgactttcaaaataaaaccttattttggcaaaggcaaaaaaaaaaaaaaacgaaaaagcctcataagacaactaacaggaggggggcgcgaacacgacaaaaataaccccccagggagagggcggccccagaggttactcgcgtcaccacagggctacttgcgaccaagagtgggcccataaagagaagagcacaataaaaagcaaacacacagtagggacggacgataatacaaaacgcgaggcacacgagaaaaaccgggcaacgagggaacctagagcagagagacgc

SEQ ID NO: 8217 - DNA, 7492 bp, Homo sapiens
  misc_feature (1682)..(1711): n is a, c, g, or t
  misc_feature (2438)..(2466): n is a, c, g, or t
  misc_feature (2613)..(2636): n is a, c, g, or t
gagaatgtgagaaaagggggaaaatgcccaggaggaagcaggagcagcccaagcgccttccctcacatgttagtaggcaggaagaggcggagggggagctcagtgaaggagaacactggtatggaaactcttcagaggctccgtcagaagcatcctatggggaagtccaggagaactataagttgtctctggaggaccggatccaggagcagtccacgtccccggacacctccttgggaagcacgactcccagcagccacacgttggagctggtggcactggacagtgaggtcctgcgagactcactgcagtgtcaagatcacctttccccgggagtgtcttctttgtgtgacgatgacccaggctccaacaagcccctgagcagcaatttgaggcggctgctggaggctggttccctcaaactcgatgctgcagccacggctaatggcagagtggagtcccccgtaaacgttggctcgaacctctccttttccccgccttcccaccacgcccggcagctcagtgttctggccaggaagttggccgagaagcaggaacagaatgaccaatacactccaagtaaccgttttatatggaatcaaggtaagtggttgccaaactcaaccaccacctgcagcttgtctccggattcagccatcctaaaactgaaagctgcagccaatgccgttctgcaggacaaatctctcaccaggactgaggagaccatgcgatttgagtccctttcctccccttttagctcccagtctgccagttctaccttggccgctttgtccaagaaggtcagtgaaagaagtttgactcctggtcaggagcaccctccaccggccagctccttcctttccctggcttctatgacctcctcagcggcccttctgaaggaggtggccgcaagggctgcgggcagtcttctggctgagaaatcatcgctgctgcctgaggaccctctgccgcccccgccttcagagaagtaaccagaaaaagtcactccgccacctccaccgccacctccaccacctccaccaccaccaccacaatccctggaattattattactcccagttcctaagggaagagtttctaaaccctccaattcagcctcagaagaggaaagtggaaagcctttccagtgtccaatatgtggtttggttattaaaaggaagagttactggaagcggcacatggtgattcacacaggtttaaaaagtcatcagtgtccgctctgtccattccggtgtgctcgcaaggacaatctcaaatcccacatgaaggttcatcagcaccaggatcggggagagacctttcagtgccagctgtgcccttttacttcctcacgccacttcagcctgaaactccacatgcgttgccatcagcacttcctgaggacagaagccaaggtgaaggaggagatcccagacccagatgtcaagggatctccccacctcagtgacagtgcctgcctggggcagcaaagggaaggaggagggacagagctagtggggaccatgatgacgtctaacactccagagaggactagccagggaggggctggcgtctcgcctttgctggtgaaggaggaacccaaggaagataacggcctgcccacctcctttactttgaatgctgccgacaggcccgccaaccacacaaagctgaaagacccnnnnnnnnnnnnnnnnnnnnnnnnnnnnnnattgttcagccaggacatctctgttaagatggcgtctgattttctcatgaagctgtcagctgcaaatcagaaggagcccatgaatcttaattttaaagtgaaagaggagcctaaggaaggggagtccctaagcacgactttgcctcggtccagctatgtgttcagcccggaatctgaagtgtcagccccaggcgtctctgaggacgcactaaagccccaggaagggaagggaagtgtgctaaggcgggatgtgtcagtcaaagcagcctctgaacttctcatgaaactctcagcggaaagctacaaggaaacacagatggtgaagattaaagaggaacccatggaggttgacatccaggactcccatgtctcgatatcacccagccggaatgttggctacagcactttaatcgggcgagagaaaaccgaacccttacagaagatgccagagggcagagtacccccagagagaaacctcttcagtcaggatatctctgtgaaaatggcttccgagctcctctttcaactgtcagaaaaagtgagcaaagagcacaatcatacaaaagaaaacaccatccggaccacgaccagccctttcttttcagaagacacatttagacaatcaccattcacctccaattcaaaagaactgctgcccagtgactccgtgctgcacggaagaatatcagctccagaaacagaaaagatagtcctagaggcaggaaannnnnnnnnnnnnnnnnnnnnnnnnnnnnagctttttccctgtgacgtgtgtgggaaagtgtttggccgacagcagacattgtcccgacacctctcgctgcacacagaggaaagaaaatacaaatgccacttgtgcccctatgctgctaagtgccgtgcaaatctgaaccagcacnnnnnnnnnnnnnnnnnnnnnnnngtgagtacagacaccgaggacattgtcagctcttgtcacatctgaaggcagtgatgggaagaaacatccttattattacagttgtcacgtgtgtggatttgagaccgagctcaatgtccagtttgtcagccacatgtcactccacgtggacaaggagcagtggatgttttcgatctgctgcactgcctgcgacttcgtcaccatggaggaagcagagataaagactcacattggcaccaagcacacaggggaagacaggaagacccccagcgaatcaaatagcccctcttcatcctccctctcagctctgagtgattcagccaacagcaaagatgattcagatggctcccagaaaaacaagggcgggaacaatctgctggtcatctctgtcatgcctgggagccagccctcactgaacagtgaggaaaagccagagaaagggttcgaatgtgttttttgcaactttgtctgcaagacgaagaacatgtttgagcgtcatctgcagatacacctcatcacccggatgtttgagtgtgatgtgtgccacaagttcatgaagacccccgaacagctgctggagcataagaaatgccacactgtccccaccggtgggctcaactcaggacagtggtgagtttcagactcctctaggtgcccattctgcatttattccaccaaccgccccgctgccatggagtgccacctcaagacccactacaagatggagtacaagtgccggatctgccagacggtgaaggccaaccagctggagctggagacgcacacccgggagcaccgcctgggcaaccactacaagtgcgaccagtgcggctacctgtccaagaccgccaacaagctcatcgagcacgtgcgcgtccacaccggggagcggcccttccactgtgaccagtgcagctacagctgcaagcgcaaggacaatctcaacctgcacaagaagctgaagcacgccccacgccagaccttcagctgcgaagagtgcctgttcaagaccacacaccctttcgtcttcagccgccacgtcaagaagcaccagagtggggactgccccgaggaggacaagaagggcctgtgtccagcccccaaggaaccggccggcccgggggccccgctcctggtggtcgggagctcccggaatctcctgtctcccctgtcagttatgtctgcctcccaggctctgcagaccgtggccctgtcggcagcccacggcagcagctcagagcccaacctggcactcaaggctttggccttcaacggctcccctttgcgctttgacaagtaccggaactcagattttgcccatctcattcccttgacaatgttataccccaagaaccacttggatctcacattccaccctccccgacctcagactgcgcctcccagcatcccctcacccaaacactccttcctggcctatctcggactgagagaaagagcagagactgtctgagggcagccatgttctgtaccaaaaacagagagacaaaagacaaaaaaaaaaaaaaaaaccacaaaacttaaacacaaccccagcaggtgtatgttgctgcaaaacctacagaccccgatgggtctggaacatgtgtactgtatatctttagtaaggaatagaaaattggctctgtgtgtatacctattgcattgacctgaaagctgctttatccaatcttcagagaggtgacctactgcatacttctaccttcagaggcatgcctccccagccacccactcccactctcagcccttctccgtacttttctctgaaaggaatcttgtcttgttaaaccctaaagagagtgtccttaatagcaatcagcacttgtaagcttatatactggtgcatttggttttctgttgggtgaatgcggtgtgtgggcgtttgtggattctgaaagagaaagccgtgtgtcgtgtgccatgacatttctattgcacattctttgtactggcttctttaacagcgatgaacgttcttttccctcctgggttgttcatccacgacagtctctccctgtgctccttcatcacctttccctctctctttgatggctacagagtggtagggcctggtgcttagtcgatgaaggaatggtagccatctacagtgctgctggagatttccgccagagcgctggagaccttgcgctcagatcttctctggtgatgaagaggcgaggaatcaagtgactgatctggaagaaatatctcgcagcactgcagctaacatcacagaacttaagtgtgttttgtgtgtgtgcccacacgtagacaaatgtgtacggtgcacacacacagtgcatcattttttaagggcagattatatatatatatgagatgtattaattcagtggttaccatttgtttgcaggaaaaagaaatgtatgggtgaaaaaatttatggttgataaatccagccaaggagattaaaaggggtttggataaattctgggtataaatgctcagactaaaaaaaagaaatggcagttttgcacagtgctatggtcttgcactagtttttgtttctcatctgaaaaaaaaaaagtaaaataaaaggaagaaaatgtaccttttttatggaatgagtagactgtatgtttgaagatttagccacaacctctttgacatataatgacgcaacaaaaaggtgctgtttagtcctatggttcagtttatgcccctgacaagtttccattgtgttttgccgatcttctggctaatcgtggtatcctccatgttattagtaattctgtattccattttgttaacgcctggtagatgtaacctgctaggaggctaactttatacttatttaaaagctcttattttgtggtcattaaaatggcaatttatgtgcagcactttattgcagcaggaagcaggtgtgggttggttgtaaagctctttgctaatcttaaaaagtaatgggtgatttaaaaagaaaaaaggaaaaaaatctttggctgaatatgttcattgcttgtatttttaaaacaacagaatttccagtatgaaacaggctgaaagagcaggaagaaatgttctttgtataataatgggaagtttggaatataaaagtttatatattatttatctattggagaactggtgtacaggaggaacattttcttactgtgttgctgttttccatcatgtgttatcctaagagttggggttttttaaaatctgtttcaccaggggaaaataaaagcatccctaatgttcttcctctagtcagtttgctttgctgaaagctccctggaaattagtacagttctacaggaagccagaagactgtactgtctgtccacaccatggtctcctcagtcccctccacgccagcccctcttccccacacctagtaggtgtgctacacctccctttgccagtcatcccgccatggatggggagcctacttggtgccctggcaaacctgtttacactaaggagatgcccacagggagcgggaagctcccaaaccctcagtcattctccagcagagacctttgctcttggccaggtttgaaacgatgttcaacctcgccacgtcaatgtctcagtaaaagacactatagatagttatggacaatacactccaagaatactgggcttatgggtgggttggttttttgttttgttttgttttgttttcaagtcatgtctttatccccatataatggagaatgtgccacttggctaataatgtgttttcaaaactacaagttcagtgatgacaggaaagagggctaaagtagtcccacagaggctggtagaaaaggcgaatcacacttaagcaccagcaggttaaaaacctgaaagggtggccctgacaattcagactataggttttacagcatgccacttgtgcaataggaggtctagggttgaaactttcaagaacgagaggaggtgaaggaaggagacgtttactgctcaaatgccatgcatttcactgcttgccactgaacttgtatttgaatgacttagtaatgcttaatataattgggcaacttttttagcactttggaaagagtcatcaatctttctggtaaattataaaagttttctgagtgagaaaaggtgtgtttggagtttgtttgactttttatattattattgttattaataaagaaaaaaatctacagcatttttcagactccaccctagaaaatatgtacccctgaatttggtttgcagtttgatactcagggaaggatgtattccatagatatcctttccgtataaaacactaacatctttgagaaattcacctaccaactaacttcaattgttgtcactatgcattcttcaatgaaaactagcttatttttccatatagtaatgcagttagggttctcagcactttctttcttctatcctttttttaactcttcatattatgttcagatgatcatactgtcaaggtttgtgtacattactgaaaatttgtattgtataaagctttttgcattacgaggctgtacagggcattttgacagtaactggtatattcctttgcatcttatgttgcattgccaatttctagtgtatccagtttgaaagtataatatactctaattaaaaaaaaaaaaaaaaaagctataaaaaaaaaacagaccaaagacaagaaaccacaaaaaagggggggggcaaaaaaaccctggggcgcacataggccccgcctgtaaggagccaccaggagtatactacaacggggccaacaacagggaagaagacggacagtagagaaaccacgggtgtgtactacccacacagcgaacaagaggaccacggcgagaacgtagaagatagaagagacagactacacgacgaccaac

SEQ ID NO: 8218 - DNA, 2614 bp, Homo sapiens
  misc_feature (146)..(165): n is a, c, g, or t
tagttttattttctcatcttaatctctccataatttcccatttaaaggtttacaaatatgagtgtgtggatgctttaattcatttaacctcactcctcaaaggtaacatgcaacttagttctgttatatgagagtctttttctttnnnnnnnnnnnnnnnnnnnntgtgaatctgttgatagaatttaaaattccaggccgggcgtggtggctcacgactgtaatcccagaactttgggaggccaaggcaggtggatcacttggggtcaggagttcgagactagcctggccaacatggtgaaaccccatctctactaaaaatacaacagccaggtgtgatggtgcacgctcgtggtcccggctgctcaggaggctgaggcaggagaatcgcttgaacccggaaggcagaggttgcagtgggctgagattgtgccactgcacgccagcctgggcaagagagtaagactctctctcaaaaaaaaaaaaaaaagaatttaaaatcccaatttattttctaactcttttattggatgtatttagaacacagtatacctatagtatacctatgtgtttattatgtttgtaaatggtaactgacatttaattattagaagtacttacccctgccttcctccatttttattcatggctacttgagaaagcaaaaggaaaaaataatagttatcagtagtgtcactggaaagaagagaggagggacaaaactgagcagcagaattcgtatagacatttacgtttaaattctaaaagcccaattgagatgttcagggagggtttgttttgccctttggcctcatgaatgggtttcatgaatgggcttcagtggcttataaactctgtaaaattctattctaaattttgtacatttattttgttccggttaattccagaagacatttcaaacatttttcttacaccatataataaaaatacttaactaaattgacagttataaaaataaatcagtgaaatgtaccttatactttaataaaaaatgttttcagaaatagataagtgaaagctgagtgtttctttgataggttcccctgtactataggagtgataattgcagctattgcaatagtagtaattgttaaatggatactaatgaatagcatagcatagtgggtaagagtttatatagcacaggctctagaatcagattaagtaggttcaaataccagttctgccagtaactggttttagaaccttgggcaagttaaagaatgtctcccagcctcagtttccctatttgtaaaatggaaataatggtagctacctcaaacctcattacgaattcaatgagttaaacttgaaaagacttattacagtagctggcacataaagacttgatagtagtttatatggatgctatctcatattagcatatatggaattaatagtgtatcactatactttttttttcttttttttttttgaatagagatcagtctatcacccaggctggagtgcagtggtgacatcatagctcactgtaacttctcccatactctaccaatcctcctgcctcagcatccagactagctgtgattgcaggtgtgcaccaccacacccagctacatttttttttggtagagacagggtctcactgtgttgcccagtctggtctcgaactcccggcctcaagcaatcctcccactggcctcacaatgttgggattacaggtataagccactgcacacggccttactatgctatcaattccatatatggaaaggtgttttccctttcagagctctttaaagctctgcagaagatttacatgtgtttatagagctaagagaaatcagggcatggaaattgagtgtgtaataaaaattaaactcttcatgttatataatcatgcataacttctatcttcattctctgaagttgcctagagcaccatcacagctaggaagcttccatcatgaattaccttatttccaaaagcaagtactcaaataattgtctcaagagaggaaggacaaaactgttacaagctgaaatatttggggatttgtttgacttgactagggaaccacaagttttcatataatgcctgatttagccctgtgcctaacagtttaaatcttaatgctaatgttaattgcttcccagttggttgaccttataagaaaacactgtgtggtattttaatgtggtaaacatgtgaatgaaggcctgtggctcagttaatcactcccacaactttgagctgtgagttttactggtggaaggaactttaacaggtcttcgctcttgtcattagatatcaaagaactgaaattagttggaattgtaagcagtgaatagatgtgttgttagaatgattccatcacttatacattgtttaaaatgctaataaagtaacttgctttgtaagaaaaaaaaaaaaaaaaaaaaacgacgcagcagtagagactaagacacacagcagatacaacagaggagacagaagacgaaacagaaagaaagagaaaaaaagaaagagaaaatagagagaaaaagagagaaaagagaggaaagagacacagaacagcatacagagaagaaaagataacatgcacaagagagagaacaagacagagcgcga

SEQ ID NO: 8219 - DNA, 605 bp, Homo sapiens
gcaatgtataagacctttatgttatcactcagtgctttgttttgttataattaactctaattttctaaaatgcaggaaaccttaggaacaaccaagatgacagttttgttaccttagtacccccgcatccacaattttgttttctgtgatctggaaatacacaattcataaatttgcaggccattctaagtagcatgatgaaatcttgcaccatcctactctgttctgccctggatgtgaatcaacttattcattctgtctacattacccacacactgaccacttagtagccctctaggttatcggattgaaggaatatagtgtatataaactttggtactatcttagatttcaggcatcacctgaggataaggcagaactacaatatttctagttttgtcatataaaatgaaaaaaaaaaaaacatggagatctcaacagacacccaaaattttggaatcaaattgaagggaaaaaagtaatgctttcctatgtcatttttttccaaaatattctataagcactctttctaaaacctaatgaacacttttacctttatcctatttctcagttcttagctttggtttaaaaaaaaaaaaaaaaaa

SEQ ID NO: 8220 - DNA, 3068 bp, Homo sapiens; identical to SEQ ID NO: 8031

SEQ ID NO: 8221 - DNA, 1611 bp, Homo sapiens
  misc_feature (144)..(169): n is a, c, g, or t
ggggaatgtgtccccagaaggagaaaggaggaaatcgatgacagttctcctgttcagcagttttacaaggacccattttaataagtgctatgaagggaaatcctccaaagatatcctgaaaagagtagctgcaaatgcattgannnnnnnnnnnnnnnnnnnnnnnnnngcacagaaacatgctttgaaagccaatcttatagacaattgcatggagcagatgaaacacataaatgcacaactgaacctagattctctgaggcctgggaaagcagcattgaaaaaaaaggaggatggtgttattaaagagttaagcattgccatgcagctcctaagaaactgtgtttatcaaaatgaggaatgtaaagaagcagctcttgaagctcaccttgtccctgtcttgcactctctctggccttggattttgatggatgattcattgatgcaaatttctctgcagctcctgttgtgtctatactgcaaattttccaaatggttgcagttatctttgttggtcaagttgtggacaacaccctgttcaagctacacatagagggagccgtgagcaactctctgatgctgtgtatcctaaagttggcttcccagatgccactggggcacgaggcacggttcagcagatggtttttatgcttctttcaaacctggccttgtcgcatgactgtaaaggagtaattcagaagagtaacttcttacagaacttcctctctctagcattgccaaaaggaggaaataaacatctaagtaatctgactattctttggttgaagttactcctgaatatatcatctggagaagatgggcaacaaatgattctgaggcttgatggctgtctagacttactaacagagatgagcaaatacaagcacaagagcagccctttattgcctcttcttatctttcataatgtttgcttcagtcctgcaaataaacccaagatcctggctaatgaaaaagtcattactgtgcttgctgcctgtctggaaagtgagaatcaaaatgctcagaggattggagcagctgccctttgggctctgatttacaattatcagaaggcaaaaacagctttgaaaagcccatcagtaaaaagaagagtggatgaagcatactccttagcaaagaaaactttcccaaactcagaagcaaaccctctaaatgcctattatttgaaatgtcttgaaaacctcgtgcagctccttaattcttcctgagtgccatgggatgctacaccttgaagctgacagtcatcaacaggggagctaaagttgaagccagctgtgtgtagcagctgttacctgaagacgtgctacctctctacaaagtgttgatccccttctttcccatgagagagagaactggtgatactccaacaccgtccagttgtggcagctctccagaagtaatagcagctgacaactttctgtgccttttcctttctgttgaaaaggcatagaaagttctgggaacataaacatttttacccttttctatgccatttattttgtaaaaatcctatttaacagttatttaataaaacaatatttttagaaactaaaaaaaaaaaaaaaaaaaaaaaaaaaaaaaaaaaaaaag

SEQ ID NO: 8222 - DNA, 1324 bp, Homo sapiens
gggggcgtggcagtgcggcgcggctccggttcccggcggccctcgcggcacgagggggcttcaggacaattcgtgatggcgggggctggttccgccgctgtatcgggggcagggaccccggtggcggggcccacaggccgcgaccttttcgccgaagggctgctggagttcctgcgacccgctgtgcagcagctcgactctcacgtacacgccgtcagagagagccaggtagagctccgggaacaaattgacaacctagccacagaactgtgccgcataaatgaggatcagaaggtggccctggatcttgacccctatgttaagaagctacttaatgcccggcgacgcgttgtcttggttaacaacattctacagaatgctcaggaacgactgagacggctaaaccacagtgttgccaaggaaacagcccgcaggagagcaatgctggattcgggaatttacccccctggctccccaggcaaataacagatgagcctatggactcagtagcacaagtactgttccccagctgccttgtttcaacagacatgcaaagatcctaggagacagtccccatagaccttcagacattaaaaagggagccgtacagtttgtttgaagcacttcgtcttacccatttatgtaggggccccaggaaacctacacacagccagaatgaggttcccaaaggacttacattaattatggctcttgcttcctttcacaaatgagctgaggcctctacttttttttttaagctgcatacttgaggcttaccttcttcaggactagttaaccagaggggcttcctttgtatgttacatgcctggttacatgggcctggacagcatgtcctctacctgtgacttctcattttcctgtttacactggggatttggagggggcaggcaaagtcaaagtgaatgacctctgtccacccacttttttattgcactggcttgaatacagtagcagtgttgatagaatcattttattcaataaatacttaaaatgaaaaaaaaaaaaaaaaaaaaaaaaaaaaaaaaaaaaaaaaaaaaaaaaaacttctttgtcgggggggggaaaaaaaaaggtaatgaaatgggccccgtggggcataacctggtttcccggacccaactttttcttggaaacaagggtggaaatttgtcggggcctccccatatagggggccccaatttaatttttccaaaaaacccagggttaacccgtgctcttaaggagaagggggttggacgataccccggggaaattattacccccccgcgttatggaaagcagggggtttttttttgtttgttga

SEQ ID NO: 8223 - DNA, 6182 bp, Homo sapiens
  misc_feature (609)..(637): n is a, c, g, or t
  misc_feature (2281)..(2302): n is a, c, g, or t
ctgtgtgttcagccattactttgctcggcgctgctcccaggcatctccgaccctcggtgctgtggggagccccacacttgggctcctcgcctctcgccctcgctccccgtccctcctcccctctctccgccccttcccccttttctttctcctctctttcttcccctctctcccttctttcggccgccgtctcccccgcgccctcctcggggcggagggaagccgtgaagggggagggagggctcggtgtcaatttttttttgtgtggctgcggccgtagcctgtggcgggcaagcggggagaccccggcgcagcagaaccatggatggcccgacgcggggccatggactccgcaaaaagcggcggtcgcggtcgcagcgagaccgggagaggcgctcccggggcgggctgggggccggcgcggccggcggcggcggggctggccggacccgggcgctctcactcgcctcgtcgtcgggctccgacaaggaagacaatgggaagcccccgtcctccgccccgtcccggcccagacccccgcggaggaagcggagagagtccacctcggcagaagaggacatcattgatggatttgccatgaccagcttnnnnnnnnnnnnnnnnnnnnnnnnnnnnntagcacttaagcctcaggaacgtgtggagaaacgccagacgcccctgaccaagaagaaacgagaagcacttaccaatggcttgtcctttcattcaaagaagagcagactcagccacccacaccactacagctcagatcgagaaaatgaccgcaatctctgccagcaccttgggaagagaaagaaaatgccgaaggcactcagacagctcaagccaggacagaacagctgcagggacagtgacagtgaaagtgccagtggagaatccaagggcttccaccggagcagctctcgggaaaggctcagtgatagttcagctccttccagcttgggaacaggctacttctgtgacagtgacagtgaccaggaagagaaggcatcagatgccagctctgaaaaactcttcaacactgttattgtaaacaaagatccggagttaggtgttggcacgctaccagaacatgacagccaggatgcagggccgattgtccccaagatatcgggtctagagagaagccaggagaagagccaggactgttgcaaagagccaatctttgagcctgtggtgcttaaagacccctgccctcaggtcgcacagccaataccccagccgcagacggagccccaactccgagctccttctccggaccctgacttggtgcagcgcacagaggccccacctcaacccccacctctgagtacacagccaccacagggccctcctgaggcccagctccagcctgccccgcagcctcaggtgcagaggccacccaggccacagtcccccacccagctgctccatcagaacctcccacctgtgcaggcccacccctctgctcagagcctctcccagccattgtcagcctacaacagcagtagcttaagcctcaacagtttaagcagcagcagaagcagcactccagcgaagactcagcccgccccacctcacatctcccaccacccctctgcctccccgttccccctctccctgcccaaccacagccccctgcacagcttcacacccaccctccagccccccgcacactcacatcaccccaatatgtttgcccctcccactgctctgcctcctccaccaccactgacatcaggaagtctgcaggtggccggacacccggccgggagcacttactcagagcaagacatcttgcgacaggaactgaacactcgttttttggcctctcagagtgctgaccgcggggcttccctgggccctccgccctacctgcggaccgagttccatcagcaccagcaccagcaccagcacacccaccagcacacgcaccagcacaccttcacgccgttcccccacgccatcccacccaccgccatcatgccgacgccagcacctcccatgtttgacaaataccctacaaaagttgacccattctaccggcacagtctcttccattcctatcctcctgcagtgtcgggcatcccccctatgatcccacccactggcccttttggttcactacaaggagcatttcagccgaagacatccaaccctatcgatgtcgctgctcggcctgggacagtcccacacactttactccaaaaggacccgaggttgacagatcctttcagacctatgttaaggaaaccagggaagtggtgtgctatgcatnnnnnnnnnnnnnnnnnnnnnnaccaccaccaacagaaagtcaagaaacagatgcagtcagacccacataagctggactttggactgaaacctgagttcctgagccgccctccaggccccagtctttttggagccatccaccacccccatgacctggcacggccttcaactttgttctctgccgctggtgctgcacacccaactgggaccccttttgggccacctcctcatcacagcaacttcctcaaccctgctgcccacctagagccttttaatcggccgtctacattcacaggcctagcagcagttggtggcaatgccttcgggggacttggaaatccttccgttacacccaactcaatgttcggccacaaggatggccccagtgtgcagaactttagcaaccctcacgaaccctggaaccggctgcaccgaacgcctccgtcgttcccgacccctccgccctggctgaagccaggggagctggagcgcagcgcgtccgctgcagctcatgacagagatagagatgtagataaacgagactcatctgttagtaaagatgacaaagaaagggaaagcgtcgagaagagacactccagccacccttcaccagcacctgtcctcccggtgaatgccctgggacatacccgcagctccactgaacagatccgggctcatctgaacactgaggctcgggagaaggacaaacccaaagagagggagagagaccactcggaatcccgcaaggacctggccgccgacgagcacaaggcgaaagagggccacctgcccgagaaggacgggcacggccacgaggggcgcgccgcgggcgaagaggccaagcagctggcccgggtgccgtctccctacgtgcggaccccggtggtggagagtgccaggcccaacagcacctcgagccgggaggccgagccgcgcaagggtgagccggcctacgagaaccccaagaagagctccgaggtcaaggtgaaggaggagcggaaggaagaccatgacctgcctccagaggccccgcagacccaccgggcctcggagccgccgcctcccaactcctcgtccagcgtgcacccggggcccctggcctcgatgcccatgacggtgggggtgacgggcattcaccccatgaacagcatcagcagcctggacaggactcgcatgatgacccccttcatgggcatcagccccctcccgggcggagagcgcttcccgtacccttctttccactgggaccccatccgggaccccttgagggatccttaccgagaacttgacattcaccggagagacccgctgggcagggacttcctgctaaggaacgacccgctccaccggctctcgactccccggctgtacgaagccgaccgctccttcagggaccgggagcctcacgactacagccaccaccaccaccaccaccaccacccgctgtctgtggaccctcggcgggagcacgagcggggaggccacctggacgagcgggagcgcttgcacatgctcagagaagactacgagcacacgcggctccactccgtgcaccccgcctccctcgacggacacctcccccaccccagcctcatcaccccgggactccccagcatgcactatccccgcatcagccccaccgcgggcaaccagaacggactcctcaacaagacccctccgacagcagcgctgagcgcacctcccccgctcatctccacgctggggggccgcccggtctctcccagaaggacgactcctctgtccgcagagataagggagaggcccccttcccacacgctgaaggatatcgaggcccgataagccgagaacaggagcaagaacgaggaagaagaaaccctaggcagacaccaggccaggcttgagagacagaactcctgcatggctcacacagactgggggggaaagccccaccccttccccttgtaaaaaatgtatagactcagtgcacattttgaaatgttttgtatattatatgttgagatttttcagatcttttagcccagtcatatgttctcacgtctcctactttttgtttctcgtataaaactttttgatttgaaccaaaacagtgaagatgacaacacacaccaattggatgataattgtagcgggggcggtgggggggagaagtccacgccatccatcatgcaaaattctttcagatgaggtgggaaggccgtgtacatagttatgtaaaaagagattgcttcatgagctaatggttcatatatgcaaaagggtaagatgaaagctttactttgtacaaatgtaaatagataaagtaacataatacattaatacttcttaaaatgtgctatttgcaaacttacttaatatcagtgaacacagtcggctaaagctgtgttcccatatattgttatagacagctaaacccttcaactatgcaatgaatgttcgggcttttcacaaaagcccgcctaactcaaaggagccttttcaaatccatttacagcatacttaaggtcatattttccctgaacaagcgcttacgtgatatgactctgttttccttgcttgttttttttcaaacggagaaacatcctgttttgcaaattggaccccaggctggaacttagcatctgaagttgccgcttgtgggctctgggggaaagtgtagccccggagaggtaactgaggacatgagcaaccagtgccagggagggtgggatttgccagatgccaaaatcaggggacgggtggtggtgtctgtcagacacacacaggtcgccagtgacttcacacacacctcatgtgagaaccatgccttttttagtgtgtcctatttcatacctgtacacacttcctcgttttgtaatgagatttacttacacccaaacagatcctgaaagaaagcttcaagttttctcagatgatggatatgttttcactgtattcaataactgacggatgtaaggtgcacgtttcctgatgtgacgcactgtattccagctggtgatcaagtctgggaacagccgtaacaggtcaaccttgtggagccatcgcgagttagagggtgaaagatggcagaaaaaaaagtcttgtgtgtgagtgtgttttttgagtttgcatcaatcttaatgtctcttcataatacttttataatacattaagcctcttgtctacatatttggagagaatatgactttactagcagagaaatacaatatatcttgtctactggactgtaaaatatatgtatgaaataaaattagttccatttggtcttctagtatattaaagtgctatctgacgttgttatcctgtttttgcaaaaaaaaaaaaaaaaaaaagttaactacagaccattgtttctaataagcagagagatctattttagtagtaaactgaaggtttagttgtgagcttcagattttgtgaactccagatgttgtgcggtgtttttttttttttttaagacaacaactaaaaaaatgcaaggaatatgtacactggaactgtagtggtagctttcagtattgtaaaaagattgttctatacggacctttttgctgtttatcctgtatgtaataaagtcctttctagatcctatgtgaaaagaaaagtgaagcaactgaatcttcagcatgttctcatcggcggagccttcttgtgtaatgtaaactgtgccatgttattaaaaaatgtgaactaagcttccagctgcttgtttgtgtgaggtgaccatcattaccttagggaagaagccatacctgtacaagaccgggctcttgaaaagaaacacctcgaacccagcccgtgtaagaacagaaggctcacctgcagtggctgaccaccctacccaactcggttagtgtctcaccaatttgttactataaacatttgcaccccaaaaaaaaaaa

SEQ ID NO: 8224 - DNA, 532 bp, Homo sapiens
aagaccccctttattaaccctgtactggcacttaaaacatactctattgtatttgccagctccttggcctgtctgcaagttccttcaggcatgctgccatcattctcatttatcactgtatctcctgtgcccagctttaaaaatattaggtaaatgagtgaaaaaagaaaatgtactatagttgcctctgttagaatgtttttctcccatgcaattccagatctacaagcagacctgcttattgagtttattgaatttctacctttttttctgaaaatcagaatatctcagggtccataaatctgtgagaaactcgtgggaagcagagcagcacataacagcaagatgattttccccttccttttgtctttaggggtcaagaattcttgtctcatggttcaggcattgtgttaactatttctgtgcattctttaagcatagttgtaactgtagttttgattgaaatattaacctataagtgatttggaatatcaaaataaacattcatatcacagaaaaaaaaaaaaaaaaa

SEQ ID NO: 8225 - DNA, 1288 bp, Homo sapiens
gggggccgcgagcactggcgggttctgggtcctgtgaccggtcaggcggcgtcagcgggcgcggcggagggctggccggcctcgggggagtttccgcggccgccgggggcgcggcggcagagcgcgaggccgggcagggggccagactcggagtcgaggcgcgcccgacagccgcagcgctcatggcgggcggaggagccggggaccccggcctgggggcggccgccgccccagcgcccgagacccgcgagcacctcttcaaggtgctggtgatcggcgagcttggcgtgggcaagaccagcatcatcaagcgctacgtccaccagctcttctcccagcactaccgggccaccatcggggtggacttcgccctcaaggtcctcaactgggacagcaggactctggtgcgcctgcagctgtgggacatcgcggggcaggagcgatttggcaacatgacccgagtatactacaaggaagctgttggtgcttttgtagtctttgatatatcaagaagttccacatttgaggcagtcttaaaatggaaaagtgatctggatagtaaagttcatcttccaaatggcagccctatccctgctgtcctcttggctaacaaatgtgaccagaacaaggacagtagccagagtccttcccaggtggaccaattctgcaaagaacatggctttgccggatggtttgaaacctctgcaaaggataacataaacatagaggaagctgcccggttcctagtggagaagattcttgtaaaccaccaaagctttcctaatgaagaaaacgatgtggacaaaattaagctagatcaagagaccttgagagcagagaacaaatcccagtgttgctgatatatggcttctgcttctcttgtgtgtgcctcagctctgaagaagttcctgagaatgggttacagatgtcatgttagctgggagtcttcccacatgtggcacttcaaaaggcagcaccactgggcgcctgcacttatttgaaaatggaactttgggagaagtatccctgctagtggctctgtaacttaacagatgacaattaggcttttgtcattgttgccatcatatggaagataatgtttacatccttttaaacatttttatatgacaattcctcaggatttggtaaggcttccaagttgtagcttttagtgtaagtgctggggtggtaataaaatgttacctccaaaaaaaaaaaaaaaaaaaaaaaaaaaaagaaaaaaggaccgaaggggaaaatacggggtatcaaagggggccttgggggc

SEQ ID NO: 8226 - DNA, 5313 bp, Homo sapiens
gcttggcacagaagacagccgggacaccctggaggccgccacaagcctgtacgaccgagtggatgaggaggtgcacaggctggtcctcacctcgaacaatcgtctccagcagctggagcacctccgggagctggcgtcactcctggaagggaatgaccagcaatcctgccagaaaggactacagctggcgaaggagaacccgcaacgtacagaggaaatggtccaggatttcagaaggggcctgagcgccgtggtcagccaggctgagtgcagggagggagagctggccaggggcccatccagctgctcaccgtctcgcagctggatggggcccctggacccggaggcttgtccctcctcacccgtggctgagtgtttgaggagctgtcaccaggaggctacctcggtggctgcagaggccttccccggggcaggtgtggcagtgctgaagcctcatgccctggggaaaccgtgggcatcacagcaagacctgtggctgcagtacccccagacccggctccgtctggaagaggccctttctgaggctgccccagaccccagcttaccgccccttgcccagagccccccaaagcatgagcgtgcccaggaggccatgaggaggcaccagaagccaccctcattccccagcacggacagtgggggtggtgcctgggaacctgcccaaccactgtccggcctccctggacgagcgcttctgtgtggacaggacggggagcccctgggcccagggctgtgtgctctgtgggacccactgtccctcctcaggggccttccaggggcaggggccaccacggcccacctggaggacagctctgcctgttcctctgagcccacccagaccctggccagccgccccaggaaacatccccagaagaaaatgataaagaaaacgcaaagtttcgagatacctcagcccgacagtggccccagggactcctgccagccagaccatactagtgtcttcagcaagggcctggaggtaaccagcactgtagccacagagaagaagctcccgctgtggcagcatgccaggagccccccggtcactcagagccggagtctgtcctccccctcggggctccaccctgctgaggaggatgggaggcagcagccgactgaggcacatcatggccgagatgatcgccacagagagggagtacattcggtgcttaggatacgtcattgacaactattttccagaaatggaaagaatggacttgccccagggccttcgagggaagcaccacgttattttcggcaacttggagaagctccacgacttccaccagcagcacttcctccgggagctggagcgctgccagcactgccccttggccgtgggccgcagtttcctgagacacgaagagcagtttgggatgtacgtgatctacagcaaaaacaagccgcagtcggatgccctgctcagcagccatggcaacgccttcttcaaggacaagcagcgggagctaggtgacaaaatggacctggcctcctacctgctgcggcccgtgcagcgtgtggccaagtacgcgctgctactccaggacctgctcaaggaggccagctgtggcctggcccaggggcaggagctgggcgagctccgagccgccgaggtcgtggtctgcttccagctgcgtcacggcaatgacctgctggccatggacgccatccgcggctgtgacgtgaatttgaaggaacaggggcagctgagatgccgggatgagtttatcgtttgctgcgggaggaagaagtatctgaggcatgtgttcctctttgaagacctcatcctgtttagcaagacccagaaggtggagggcagccacgacgtctacctgtacaagcagtccttcaagacggccgagatcgggatgacagagaacgtcggggacagtggcttgaggtttgagatttggtttcgcaggcggcagaaatctcaggacacctacattctccaagcaagctcggcagaggtcaagagtgcatggaccgatgtcatagggaggatcctgtggcggcaggcactaaagagcagaggaaggcggggaacaccccccaggcagagagacctgggcagccaccgccatgaatgagagctctctggctgtccccaggccagctatgctctgatggccaagcgtggtggtccttgcctgtgtccgagcgtggggttagttctggaacatttgatcacttctcctgctccactctctgcactccacctggaactcccgattacacaactcagaatccaagaaatggcatccatggggataggcaaccagccattcatggatgtcaagcccagagaccggacccctgactgtgcagtgataagcgacggggctcccaaatgtgcagtgatgagcgaccgggtccccgacagcatcgtcaagggcacagagtcacaaatgagagggtccacagcggtgtcctcctctgaccacgccgcccccttcaagcgaccacactccaccatctcagacagcagcacctcctcttctagcagccagtcctcctccatcctggggtcgctgggcctgcttgtgtcctccagcccagcccacccgggcctatggagccctgcccacagcccctggtcatctgatatcagagcctgcgtcgaggaagatgagccagagccagaactagagacgggcacccaggctgcagtgtgtgagggggctcctgctgtgctgctgagccgcacacgccaggcctgatgactgtcagggtggcagtgcccatcatgtggctagaacaatacagagggagcagcacgccaggcctgatgactctgggggtggcggtgcccatcgcgtggctggaacgatccagagggaatagcacagcaggtgtccaggtatttcccaggattttagacattccctaacattttcaaacaaatttataattttgtcttatttaaaaaacaaaccttccacttccacccaagacaacagcataggaaacagacctaaaacaagacaaaaaaagactaaacatgaaacaaaagatgtcaagacacaagacatttggcaacaaaggaccgcgatccctgagagacaggaaaacgggaggtgagcccggtgatggcctcagacctccctccgccttgagagtttgcaggcctcagtgcagggaggggcccaggaagagcccagcagcctccgtgagttgaagagaccaagtcagcaggagttggcaggtcagagtgccagagagagatgcctgcatggggaaagactcaccagatcagcccctccagcacctagtgggttgctacccattcgcacactcaaacagggaggctaccaaggctgggagcaacctttgaaaagaccaaagatcaattcctggtactcatgtgggctggggacaggacccgttcccaccagccagactagggaaactctcagtagatcaattcctgatactcatgtgggctggggacaggacccactcccaccagccagactaggaaaactcccaatctgtgagcattaggtggagttctcagaaaatcttgcctcaggaatggggataattagccctagactgagccctgctcctgactcgcctacaaaatcataaaagcaagacctaaaatgatcaaaccattcccagataattcactttatcccagaacaaagctccagatgatctaggggttaccaaagtgtccgcaccctgcaaggtaaactcacagtgcctgacctcggagtgccaggcgtgcagaggagcagccaagggcaaacactccaaggagagtcgcctggcaaagccaaccacccagagccggcgtctgtgctagaatcacagaattcaaactgtggctgaaatcgcagcccaggcgtccagaaagttaaagttaagaacctataatcccagcactttgggaggccgaggcaggcggatcacgaggtcaggagatcaagaccatcctggctaacatggtgaaaccccgcctactaaaaatacaaaaaattagccgggcatggtgttggccgcctgtagtcccagctacttgggaggctgaggcaggagaatggcatgaacccgggaggcggagtttgcagtgagctgagatcacgccactgcactccagcctgggcgacagagcaagactctgtctcacaaaaaaggttaagaaatgacttaatggaagagattcagaagacccagaccgaccttacagggatgagaaactacaatattgacagtggaaactatcctggatggggtaacagattggatttcacagaagagaccatgaggcaccttgaagacacatcagtggaaactatttgcatttgttgggcctccagagagacagaaccaataggagatagctagatatatatacagacagatagatagatagatagatagatagatagatagatagatagatagactgacagacagatgagaggggccttaggggcattggctgacacaattttggcaggtcaagagccccacaataggccatccacaagctggagacccaaggaagctgctagtgtgcccagtccgagtcctaaagcctcagagccagggaagccagtggtgtaattctcagaggccaaaggcctgagaacctggaggccactggtataagtctgagtccatagacccagtgaactccaaacacaagagatatgagtgcacatcataatcaaattgcatataaccagtgataaacagaaaatcctaaaaccagtcagaggacaagggcatgttctgttgggaggcacaaagctgatgaggatggctgactcctcaggagcagcatgggtgagaggcagtggaatgtactaaggagaaaactgccaaattcacattctgtacctgacaaaatctttccgaagcgatggtgacataaagacattttcatacacacagaaactaagagtttcatccccagcagacctgcactacaagaaatgttaaatgatgtgcttcagggaagagaaaaatgaagagcatgtgcaccatccaggattttcctcgttatttgaatccctttggcccatctcccatttgccccaaggaatgagtgctggcagtgagctgcactttttttttctctaaacgggaaatgggttaaaagatgagtggcttggccgggtgcggtggctcatgtctctaatcccagcactttgggaggctgaggccagaggatcacttgagcccaggaactggggggtcatgctgggaaacatggcaagaccgcatctctattaaaaataaataaaagttaactgactgtttaaacaaaagtaaaaaaaa

SEQ ID NO: 8227 - DNA, 832 bp, Homo sapiens
  misc_feature (49)..(49): n is a, c, g, or t
ccctccctctgagacatccgaattgtgggcgagcagtgtgatttctctntggctggccgtgccacactcacccccagagcacttatgttaacttggaactgtttagagagaatttttttgctttcttgggtcacatggctcagtagccattagccatagcttgattttgcaaactggcaagggcctggcacacctttccttccaccagggcatggtgtttctggaagagtttgaagctagatcctggtatgccaaaaaagaagcttttttttttccttctttttttttttttctttccctcttccctctctcttcccctctctctctctctgagcagttccccccctcccacccctgcactattgtcttctcttttgccacatgccctgctgggggaagaaaatggaaggtaagcaaacaggctcctctccaaggagagctcatggcagacagcagagcaggcaagtttgcctctccaaagaggttctgggaaggctggataagttttgacaagagaggagcgtgtttgcaaaagaattgtgccctcagcagagcagtgctaaggagagtctagctcctggggcctaggtgggtggtggtgtctgtacacggtcttctcttattctacagagcttctgcacttgaaactacattgttcagcctgttttcctgacttaggttgctacagagtgttctgcaagccagcctacagccagcaaatgtttctgaaagtgttttctaggctttggaggaagttttttggagtagggatggggactggggggtggggggagagatcttggacaacatcctgcaaaaaaaaaaaaaaaaa

SEQ ID NO: 8228 - DNA, 543 bp, Homo sapiens
  misc_feature (485)..(485): n is a, c, g, or t
tttttttttaattcaacctaggggctttagtttttttttaatggaaagaactggcctagaataacctactgctacagatacagctattcttctgattgggatggggaatccgtgcccacccgtgatgaaggtcccagtggtccagtcccctgcttcctggataaagggaggctcctcaggatcggaaagctaaaggcctctaagccctgatcaagtccaaagtgaaaccgccccagtgctaaaaggacggattccctgaacctgtcaagggcataagcagcctatatttgcaggtggctcacggttttcctaggacctgaagaactgagatttgtggtcagtttaatgcattgatcattataaactgagtgtctaccaggggccctactttgctaggcaacagtaggggacacaaaagtagtatgtgatcaacaaacactatctgagctcctagtgcgtggcaagcctggggactgaggacccanggagaatcaaacaggtccctgccccaaaatcaccagctgagggagatatagaaatgag

SEQ ID NO: 8229 - DNA, 1911 bp, Homo sapiens
cccatgtgtgacaaatgtggtcctggcattgtaggcatgtttgtaaagttgcggggaccatcatcccctccctgaatgttacgtgtgcactgattgtgacactccacccgaaaagagaagggcttttttttttttttccatcaaatctactgtgaagagcatgcccaggagcaagtcacaccacttgagggtacgatgtgatcatcatgttccccaagtgatccagcagacctgcactgaccaccgttctccagccagcctctgctgcagctagttctctaaatgttctggccttgtctcttgaaagttctgtacttattcccccaccccccaacccgcttaccttggttttatccctgctcattgaaccttgagtcccttgtcttggttaactgactcacactgactgtgtggtgcccgcccacttttacaatgaatggcaaactgtttttgttcagtgtccccttgccggcaacactgtgtaccttcctcccctcagttcttctctgctgcaaatggacatcagccacatttgaaccaaatcaaatataatatgtctgacattgatttcatttttgctccatctatagactcccagaaaaaagaaatatattaaatgcaaagaaaatttaaatgaacaaacagacccttctggaacctactgtgacatgagatgtgtccacaaggcgaggtttcaggcacacactgaaggagcatctgctggacagccctccccgcccccaagtccttaccaacctgtgccactgcataccctgtaaaaagtgtgtggtggttggtaatggaggagttttgaagaataagacattaggggaaaaaatcgacctcctatgatgtaataataagaatgaataatggtccctgttttaggacatgaaagaagaagttgggagaaggacaaccttcccgacttttttatcccagaatctgttttttccagatccctattcacaatgaccctaatacgacagtgattcctcactgcttttaagccacatgatttaaggtggctgttggaattgttgatgggtgacaaaataaacactaatggtttttggaagaaaccagccttaaacctgatttataaaccttatcaaatccgaatattagatcctttcattatcagaacagcagcttatgaactgcttcattttccaaaagtgtttcccaaaaatcagaaacctaaacacccaacaacaggaattattgccatcacattggcgttttacatatgtcacgaagttcacctagctggttttaaatacaacttttctgacctcaagagtcctttgcactactatgggaatgccaccatgtctttgatgaataagaacgcgtatcacaatgtgactgcagagcaggctctttttgaaggacattatagaaaaaaacctcgtaatcaacttgactcaagattgactctacagactcagaagatgatgctaacagtgttagttttatttttgtacctgcaaatttttagtttaacaatatgttggatggcactcgtcacaataattatgtatacctgtctgtgtgctggcctggtgattcataaacaccagcttaatgttctggtgaatacgtgtatatttaacttatgaaaaacaagaaagtgtaaagataacaggaaaataagttttgatgtgcatggtttttaacaataaagctagtattctggaggtgctgtttacacacgtcttttgataggttacttcattcttagcatttttgaagcgggtttgatttctactaagggttttagtttacaaaaacaattttgataaaatttgacattatgggggggcattggccctggacctgcgtgtggcaacccgactggggttgtttgcaccccaccctgtgtgtggactcacgataccgggtaaaccc

SEQ ID NO: 8230 - DNA, 1636 bp, Homo sapiens; identical to SEQ ID NO: 7994

SEQ ID NO: 8231 - DNA, 5600 bp, Homo sapiens
  misc_feature (1293)..(1333): n is a, c, g, or t
cgcgcttccgggttggctgtggctgtggctgcggcggcggcgcaggagcagaaaccggtgcggcgcagaagccccagaggcgggcggggcggagcggagggccagcgggccccggcgtgggtctcccgccaggccgccggatttaacccttagtggcttctgaagaaaatggcagaaacatcgccagagccttctgggcagcttgttgtacactcagacgctcacagtgacactgtgctggccagttttgaggatcagaggaagaaaggcttcctctgtgacattactttaatcgtggagaatgtacatttccgggcccacaaagccttacttgctgccagtagtgaatacttctcaatgatgtttgcagaagagggggaaatcggccaatccatttatatgctggaaggcatggttgcagacacctttggtatcctgctggaatttatctacacaggttatctccatgccagtgagaaaagtacagaacaaatcctggctactgctcagttcttaaaagtctatgacctggtaaaggcttacacagacttccaaaataatcatagctccccaaagccaacaactttgaacactgctggtgccccagtggttgttatccctaataagaaaaacgatcctccaaagcggaaacggggaagaccaaaaaaagtcaatacattgcaggaggagaaatcagaactggctgcagaggaagaaatacagttaagagtgaacaattcagttcagaatagacaaaactttgtggttaaaggagacagtggtgtactgaatgagcaaattgcagcaaaagaaaaggaagaatcggagcctacttgtgagccaagtagagaggaggaaatgccagttgaaaaagatgagaactatgatcccaagaccgaggatggccaggcaagccagagtcgatacagcaagcggaggatttggagatccgtcaaacttaaagattacaaacttgttggggatcaagaggaccatggttcagccaagaggatctgtggaaggagaaagcgccctggaggccctgaggcccgctgtaaagactgtggcaaggtctttaagtacaatcactttttagcaatccaccagaggagccacacaggggagcgacctttcaaatgtaatgagtgtggaaaaggctttgcccagaagcactcgctacaggtccacaccaggatgcacacaggcgagcggccgtacacctgcaccgtgtgcagcaaggctctgaccaccaagcactcactgctggagcacatgagcctgcactcaggacannnnnnnnnnnnnnnnnnnnnnnnnnnnnnnnnnnnnnnnngccagaacagacagctaaagagccattaccgagttcatacaggccactcattaccggaatgcaaagactgccatcgcaaattcatggatgtgtctcagctaaagaaacatctgcgaacacacacaggtgagaagccatttacttgtgaaatctgtggcaaatctttcacagcaaagagttctcttcagacccacatcagaatccatcgaggagaaaagccatactcctgtggcatttgtggcaaatccttctctgactccagtgccaaaaggagacactgcattctacacactggcaagaagcctttctcctgccctgagtgtaacttacagtttgctcgcttagacaacttgaaggctcacttgaaaattcatagcaaggagaagcatgcttcagatgccagcagcatttctggcagtagtaatacagaagaggtcaggaatattcttcagctacagccatatcaactctctacctcgggagagcaggaaattcagcttctcgtaaccgattctgtacataacatcaatttcatgcccggtcctagccagggaatcagcattgtgactgcagagagttcccaaaacatgactgcagaccaggctgctaatcttaccctgctcacgcagcagccagagcaactgcagaatttaattctttcagctcaacaggagcaaacagaacacattcagagcctcaatatgattgaaagccagatggggccctcacaaacagagccagtgcacgtgatcactctgtccaaggaaacactggaacatcttcatgcccatcaagagcaaacagaggagctccatttagctacaagtacttcagatccagctcagcacctgcagctgacacaggagcctggtccgccaccacccactcaccacgtgccccagccaacgccacttggccaggagcagagctgacctgtaaacacgtttgactgcttgattgggctcttcttataagccagctctgactggattttgaacgcttgaaatcaggctctccacaccattgacttgcagatgcttctgtgagagctgtgatggctaactgatgtttataatgccctccatccaggtagcaagatgtgtgtatgtcttgtctaaggtactgatttgtattgagcatttcaatattattgaatggttttcattttaatctgcaatgtctcataaagactcgggtagtttttctttgggggcattgatctcagtttttctgtaaggtttaaatgttcacagccataggttatggtcttgccaacctccccagttatgtttttttgttttctaggacaaagggagtcattttggttgaactgggcagaatggtttgttctattttcttatttttcttaggcaacacagttgttaccacaagacaagtcagggctaaatatgacagatcacaatgtatggggaatttgcccttttaataatttccagtcccctaagacaaagtaaccctcaacgttttatctttatgcagtacagtgggcttattgtgttaacacttcagaaagattcaaactcataaactcagtattttaactcaaaattcatgtaacaagatagccaaaagcataggatttcttaaaattctgaattcgtcttttctgagaaacataaatttacatatttttcaacagaaggctatcaaaattttaattaagtttaaaatacaaaattggatcaagacattcaccctaaattctgaatttttgtcagaaaagagatttgattttcatgaaggtaaagctttcttcactattctggaacataaaactttattcagtgtaatttaagtcttatatatactctactgaattctaactgatctcctgaaaatgttgatctacgtgttgtgtctgataactttctggagatggaagcttataattcatttttattgcagactagttaaatcccacaaagtgaatatcttctcctaatctttccttttttagagacggggtctcactgtatcacccaggccagagtgtagtggcacaatcattgctcactgtagcctcgaattcctgggctcaagcaaccctcccaccttagcctccctagtagctgggactacagggatgtaccaccacacccagctaatcttcatctaatcttaaaactttgagcctcagagactttgtagccagcatgtgtctgtaattgtatgatttttaaatcatcatcaaaagattaaattatgtttgggttaggttttcaagctaagcttattgaattcttttaccactttcatgtaagctggtaggggatttttgagaaaagaaggtgggcactagtatatctaaattaacaatgctgatggggagtagggggtaatctactctaaaattaatagagcctttccatcaattgttttgttttagacatccttgatttctccctaaatcaaataagttatttggaggttagagtaatagagaattcttcaggtttgagagaagataaaaacattttggttgcatatttgctaagctatattttattatatgtaattcacaaaacttccaaaatgatatatatcttatatgtatcaaccaaactaatgttaaatcaggcctgactagagcaaagataacaattttttacaaacactgttaagccctaagtattatttcaggttctcgtttaaactgtttaattttattcttaaaacacaaagtttttaccaacttttcaaagcccaccaatccacattttctccaggaaattaaatatttaagtaagtgagtgtttactcactctggatagctaggtgattattcagaaaatacggttacatagctatttataagtcaagtttcactggctctataacagtctacctctacactaagagaactataacatgaacaacataggtcactttaaatgttctagtagcaacttttaaaaacataaaaagaagcaggtgaaaatgttaataaaagtttatttaatccaacatttgccaaatatttcaacatataaaaatatattagtgagacattttacattctctttttcatactaagctttcgaaatctggtgtgtattttacactttctgcacatctccatttggatgctaatgttcattggacatacttgatctgtatttagatttcatacaacttacagttgaaaacagattctcatatcaagtagctaagacaaaagtttttttcaagaattgaaataagtatcagtttaaaaatttatattaaatttattaaaattaaaatccagttccttgttgcatgggacacagtgcaaatgcttgataagcacatgtggctagtggctgctatattggacagcatgggccacctgtttctaacttgagcatcagtcctagctatgcctgaattatttgaccagctgtcaaagagaaacaaggaaatgatagctttgttaatctagcctctttctttgtcccacatatacattctacccctttgaataaaaaagttcaatgacgccgggcgtggaggctcatgcctgtaatcccagcactttgggaggccaaggtgggcggatcacgaggtcaggagttcgagggcagcctgaccaacatagtgaaaccccatctctactaaaaatacaaaaattagctgggcgtggtggtgtacccctgtaatcccagctactcgggaggctgagacaggagaatcacttgagcccaggaggcggaggctgcagtgagctgagatcacgccattgcactcaagcctggcgacagagcgagactccgtctcaaaaaaaaaagttaaatgacttgagtacccaaaagaaatgtcgtgaacatgaaagtacttctcatgtgtccttgagaaatgatgttgctagtgcagtgtttcacaattcattttctactaaatgtgtaccattttttaaattgttttaacagaaatatagagtgtgtttcttaggaaatagaatgttatgctttggggctcctgaaacacctcgttttgaaggtgaatctttggttttctcccagaagagggtctgccttgagatgattggagctcttaccatcaaaatcagttattcaagtgcttgcccagtgcttcttgaaactcacctctactctgtattttctacagttggttcttgtgttataaatgttgtgagcaacagattaaatgatgctgaggaatgaaaaaagattctcattataaatgcttacctaggattctcattatagatgcttatctaggttttcataaatgggaatgtaacaat

SEQ ID NO: 8232 - DNA, 3547 bp, Homo sapiens
  misc_feature (199)..(229): n is a, c, g, or t
  misc_feature (2794)..(2794): n is a, c, g, or t
gctgctcaccctcgcccacccctgacgccgcggaccgcagctcctcagccccgcagccccgcagcccagcagccccgcagcggcgccgaggacagtgcagccgagttgcgtctccctcgcgcgagcagccattgtttgatgtcctgtgactgagaaaccaggctttaaactttatgcctttggagatggagcccaagannnnnnnnnnnnnnnnnnnnnnnnnnnnnnnttccacatcagatgatgactctggctgtgcattggaggagtacgcctgggtccccccgggcctgagaccagagcagatccagctctattttgcttgcttaccagaggaaaaagttccttacgttaacagccccggagagaagcatcggattaaacagcttttgtaccagttaccaccacatgataatgaggtacggtattgccagtctttgagtgaagaggagaaaaaagagttgcaggtgttcagtgctcagcggaagaaagaagcactgggaagaggaacaattaagcttctgtccagagcagtcatgcatgctgtgtgtgagcagtgtggtttgaagataaatggaggtgaagttgcagtgttcgcctcccgtgcgggccctggtgtgtgctggcacccatcctgttttgtctgtttcacgtgtaatgagctgctggtcgacctcatctatttttatcaggatggaaaaattcactgtggcaggcaccatgcagaactgctcaaaccacggtgctcagcatgtgacgagataatttttgctgatgaatgcacagaagctgagggtcgccattggcacatgaaacacttctgctgccttgagtgtgaaacggtcctgggaggacagaggtatatcatgaaggacggccgccccttctgctgtggctgttttgagtctctctatgcggagtactgtgaaacctgtggggaacatattggtgtggaccatgcacagatgacctatgacgggcagcactggcacgccacggaagcctgcttttcttgtgcccagtgtaaagcctctttgttgggatgtcccttccttcccaaacagggtcagatttactgctcaaaaacgtgcagtcttggtgaagacgtccatgcctctgattcttccgactctgcatttcagtcagctcgatcaagagactcccgaagaagtgtccgaatgggcaagagcagccggtcagcagatcagtgtagacagtctctcctcttatcgcctgctctgaactacaagtttcctggcctctcaggcaatgctgatgacaccctttctcgaaaattggatgatctgagtctctccagacaaggaacatgttttgccagtgaagaattttggaaaggcagagtagagcaggaaactccagaagaccctgaagaatgggctgatcatgaagattatatgacgcagctcctcctcaagtttggtgataaaagcctctttcagccacagcccaatgagatggatattcgagccagtgagcactggatatctgataacatggttaaaagtaagaccgagttaaagcaaaataaccagagccttgcaagtaaaaaataccagtctgatatgtactgggcacagtcacaagatggactgggcgattctgcttatggcagccacccaggccctgcaagcagtagaaggcttcaggaattggaactggaccatggggcttcagggtataatcatgatgaaacacagtggtatgaagattccctggagtgtctgtcagacctgaaaccagagcaaagtgttcgggattcgatggattctttggcattgtccaatatcacaggggcttcggtggatggagaaaacaagccaaggccatcattgtattctctgcaaaattttgaggagatggaaacagaagattgtgagaagatgagcaatatgggaactttgaactcttccatgctgcacaggagtgcagagtccttaaagagtctaagttcagagttgtgtccagagaaaatcctgcctgaagagaagccagtacatctgccagtgctcagaaggtccaagtctcaatccagaccccagcaggtcaagttctccgatgatgtcattgacaatgggaactatgacattgaaatccggcagcctccgatgagtgaaaggactcggagacgcgtctacaattttgaagagaggggatccaggtctcatcaccaccgccgccggagaagtagaaagtcccgctccgacaatgccctgaatcttgttacagaaagaaaatactctcccaaggacagactgcggctgtacacccccgataactatgagaaatttatacagaataaaagtgcccgggagatccaagcatacatccagaatgctgatctctacggacagtacgcccatgccactcccgattatggcctgcagaacccaggaatgaatcggtttctgggactctacggcgaggatgatgattcctggtgttcttcctcctcctcctcttccgactcggaagaagaaggatattttcttggacaaccaatccctcaaccccggccacagagatttgcctactatacagatgacctttctagtccaccatctgcacttcccacccctcagtttggtcagaggacaacaaaatccaagaagaaaaagggacacaagggcaaaaattgtattatttcttaaccaagtagtgatgcagagcatttgtttaaaacttagccattaaccgtctgaatcgtttccttttcttccgtaggaaagttgtgaaaatagtttaaagtgctttctttgcccatgtaaatgagganctcaaactgctgttaacaagtgtccagattaaccatttgaaaaggtgtgatttctcccaatttaccctctttggatggtgccaggtggacgtgacatctcgtgcctgtccggtgcgggtgcgttacagatggacgtagctgctttggttttccagtcctcaagggaatactgaagatgctgactgaaggggattggatgttgattttagaagatggagaactccagccacctttgtaaagcactagtgtttgtcatttatgtaagtcaggtcggctcaggtcttgatagtccgtcttggtgtgaggcatgcctgtcacgatgacctagctaacactgtgcatcttattgtgaggccagcttgtcccctcgaaccctctttggccaggtaaacattgtattgtatcagcgccagctacagattgaaaaaaaaaacaaaaaacattgctatttataacttagtatttcatagacttaagtgtattcctaatttaacggtgcaaatattaatgtatatactgtacagttcagattttaaagctgatatttttatatccctgaattgtaagccgtttgttacgctgcagtgctagatttgccagggaacccagaatttatggatgaactgattgcttatattttagtcagggtttataaatgtagatggtcaaatttacattgcctagtgatggaaaattcaactttttttgatttttttttccaatattaaaaaaggctctgtatgcaaaaaaaaa

SEQ ID NO: 8233 - DNA, 2166 bp, Homo sapiens
ctgacacggatccagtcatacctggggctggatgggatttggaggccctggtcatttgcagagtgaatggtgaagggcgcggaaaaggtttgcttggaggaaagaccggttgcagaggcgaggcggagggaggaggggcggaggcagcaggtctttgtttgtggtaggtctctggcttccatcagggaggaggaaagaggctgtgcccttcctggctcttggctgcaccactgaggacgctccgagggacagcgtgctcacccatcctttgcacagtgctggccccaagccccacggccttccagctaggattttctgctgggctcatgcagaggcaggggacaggtgcatggaagagccgccccacccgacacaccattgtttgaaaatcactgttctctttactcacttaaaaaagtgtacagggaacacctgttcctggcataatgctccaacctcgcggaaggggccaggtgcccttcatctggctctggctgcttccgacctgggcccacgtcatcgttcacgtcctctgtgaccaccactggtcacggtgctccctggcccagcctccaacccacccagcaccctggcatctcccaggccagtctgctgcacccagcgagcttccagtcagaagccaggctgaacggccctcctgccccatcagcttcgtgtcttctttttttttaaagaactgaaatagtccccaagaggcctcatggcctgaagactcacaatcatccacctgtaatttatgataaatgtctgggagcatttaccatttgcgtccgtgagtatttatagccctgaatgggcgggggggagggggggtggaggaggccctgcagccaggagctacacacctgtccccactagtgtcccctggttgacagagccccctcagcctccccaaggctgtcactgcggctgtgacagctgaggagtgccgcctttgaaagccagtggacagtcgctccactagggggagaggccctggccctggcgcagaggaggcgttgcgaggcgggacgggggctggaggggctgagcagccttcagggcagggactgggccctgggtcactggagacgttgatattagtccatctgtctgctgccaaattgctccccaccacatgagccccaggggtttatgtcccaggaaggcgagggtgcccatctgagcggaattgggaggggacggcaccagctcatctccctcagggcctttgcctcctggtgctgccctggtggctgctcctgcaccacagcccctgatggctgctgctagtcctgagttgctgggtttacccccagcccacacttcccacctgggcctgagggtgcggccagtgccctagtcctagccactacaggagtcattctgagacctgctggaggccatggggtcttcccaggcccctcaatcagctgcttccagggtcagcagggcagggtgctgccagtaaggtcctcagggagcacagcccggccgcccaggctgggggatactggggcagagcttccaggtctgtggggcctgatctctccccaaggctctccaggccttggtgcgccctccacagtgaccttcagagaggctgcaccccctcagaagaacagtgagaaatctctccatcacacgctccctggtccttatgtccctgaggccacccttccccaccccccagtgcctggagaagcgtgagactctggaggggcgccaggaggccaggggtcctcagggctaggcctggagctcggcccaagagctgcttttgcgaagcctgtcttgaatccggattcaccagagaacaagagcctcccagcctttggcgtttctgggcctgtaaagatgtgtgtacctcccaggccactctgatgcaagggcagggaccatgccaggcctgggttgggaatggctctgtgactccagaagctccgtctaaaactccaaagatgcccaaaaggctgtgctgctatgtggaatgtgtattatttgtgagcacgatgcggcttcttcctcattttgcagagcaacctaagcgggcagatgtacaaaccgtgtgttcgaaacccctgagtccatgtgtgtgaaaatgcaggttttctcttagaaataaagtggtgacttgtgctgtaaaaaaaaaaaaaaaaaaaaaaa

SEQ ID NO: 8234 - DNA, 1331 bp, Homo sapiens
tatttatgattttttttttttttttttttttcagagattatgaaaattttattaataaagaaaatctgcattacacatatcccctttaaaaacaaccacctcaaacatgtagaaatgctttattttgtatttgctatttgatcaatgccagaaaaatgaaaccacaacaccaaagtacagaccagtatttttgaaggggataataatcatttgagataataaactactagaaaatcagaagaaatgattcaaggtattcatttcaaaggctaaaccactaattcttcatccaaatgaatgtttccactgtgagtcaatacatttgccatcagttctttttaatgctatcctgaatacacaatatacacctaaaaacatgatagagtgctctgagaatagcaagaactgatagccaacatgatttacagaaatttatggctatgtagcaacggttcagagacaatctctagaaaatatgaaggtactcttcatgataggaaaggattggttttgcagggcagcttttaagttccattccggattggcctttaaataaccactctacctttgtcccttgatctcaccccttgctaaaattttataaacatattccagacatactgcatgcaaaaagggaagtataagaatattaagattctcatgccctggacatgaatagaaaacatgtacataatgtgttctcactgtcagaacaacctatagaagtgtaaagctggaaacccctcagtagagagatatacacttttaatccaaagaaaaaaaacagtgaggcctgttacttgactacagtttccagggctctggtgtagctatattttaggcatagctccaaggagcagcctacacaaatttggatggagcgagggaggcacagatggtggtcacgtgaaggcacagaccgatcgagtgggctcggctacaaagtctgtacatttaggctggtgtattcctcctgtttcaagtactgccaagtcccggctcttccccggtctttccaaagtcttgattcatttaattctcctgaaggaggtggaagaggaggagggttgcacaaatcttactctttcgtggtttagaggagacagtcaccatcttggcgccttgtcagattttaaatgtaacattctgctaagtgtaaagctgtgtatctgttccttttctgttgccattattgtaacttcaatatttgcaaaacacaacatcaaaatacttcaaatccagcccaaagcggttattcatgcaacacaattcttacacttatcaatatacagcgagctcatagcaaagggatcttttctttcctcatgccg

SEQ ID NO: 8235 - DNA, 1089 bp, Homo sapiens
tttttttttttttttcgcaacttgaggtgcactagtttttttttttttttttttttttttcactagacaaaaatctatttttaattgtataaaattatacatataaaatacatagaatgtactaagaagatgagtaaaatctttgacaccagaagtggacagatcaggaaacaatttttctcaagttatttgggatcttactggttggtatttgagaaaaataataaatccaggaggtacgagggcaattcttcccacaactcacaccccttaatccacacgtcccagagaaaggagaaacaggagtgttgatgagtgccagcttataaatgtcaaacagacacacctggtgtgtctagctgtttttgcctttactccaacccgacgtgtttcatggaatacaaacatggggcttctaccccagctctcttctgattagtaagaaaaaaaaaatgatagggcctggagaattcaaggaagcccgtttcaagcactaataaaattggtagctgggattccttacctcttacccaacatgatttcaaaagcaagaaagttgcctttcatcttgcccctatcaaatccaaaagagccaattatagcctgtttcataatctatttttattgttgttgttacacttgaactttctgtttggaacctaatctatttctaaaagcaaagtctgtataattgttaagtgggaagtccaattgcaggaatactaaatgttccaagctcagtttagaaagtacatgggacaataatatagtataaataagagatcacagagacaagggggaaatatatattagagacctccaaaaaaattctctgaaaggagaatactttagctgctgtactacaggttatttctctcttatgtcacccaggagagaagtgggggagaatggtgttaaaaacacaaatagtgccgggcgcggtggctcacgcctgtagactcctaaccggagccctggcttccagtcttgctgtccaacagccagaatggtttgtggacaacacaagtcaaatcatgtcactcctctgaattccagaactttacctggtccttcaagaccctgaagcat

SEQ ID NO: 8236 - DNA, 3346 bp, Homo sapiens; identical to SEQ ID NO: 8028

SEQ ID NO: 8237 - DNA, 2754 bp, Homo sapiens
  misc_feature (288)..(323): n is a, c, g, or t
  misc_feature (1060)..(1120): n is a, c, g, or t
  misc_feature (1289)..(1337): n is a, c, g, or t
ggactctcccctggagcagcgtgactgacaccggctcctattcagctgggaggagggagaggggaggagaaggggagggccgcgggaggagggtacgagtggccgaccacggatttgcattgccgaggacgggaccccagggcagcgaagcagaatggccaacatgcagggactggtggaaagactggaacgagctgtcagccgcctggagtcgctgtctgcagagtcccacaggccccctgggaactgcggggaagtcaatggtgtcattgcaggtgtggcaccctnnnnnnnnnnnnnnnnnnnnnnnnnnnnnnnnnnnntatggtggccgagtttttaaagaacagtaggatccttgctggggacgtggagacccatgcagaaatggtgcacagtgctttccaggcccagcgggctttccttctgatggcctctcagtaccaacaaccccacgagaatgacgtggccgcacttctgaaacccatatcggaaaagattcaggaaatccaaactttcagagagagaaaccgggggagtaacatgtttaatcatctttcggccgtcagcgaaagcatccctgcccttggatggatagctgtgtctcccaaacctcctcctctgcctcctccagggccacctccacttttcgagaatgaaggcaaaaaagaggaatcttctccttcacgctcagctttatttgcccaacttaaccagggagaagcaattacaaaagggctccgccatgtcacagatgaccagaagacatacaaaaatcccagcctgcgggctcaaggggggcaaactcaatctcccaccaaaagtcacactccaagtcccacatctcctaaatcttatccttctcaaaaacatgccccagtgttggagttggaaggaaagaaatggagagtggagtaccaagaggacaggaatgaccttgtgatttcagagactgagctgaaacaagtggcttacattttcaaatgcgaaaaatcaactattcagataaaagggaaagtaaactccattataattgacaactgtaagaaactcggcctgnnnnnnnnnnnnnnnnnnnnnnnnnnnnnnnnnnnnnnnnnnnnnnnnnnnnnnnnnnnnngtaatggggagagtgccaacaatttccattaataagacagaaggttgccacatatacctcagtgaagatgcattagactgtgagattgtgagcgccaagtcatctgaaatgaacatacttatccctcaggatggtgattatagagaatttcccattcctgaacagttcnnnnnnnnnnnnnnnnnnnnnnnnnnnnnnnnnnnnnnnnnnnnnnnnnaattatggcctaacttcctgagagaccgaaccccctcacctgaatccccctctatcaaacaaacaaaaaagcagcagtaaagagctagaagttgcagtagcccctactgctttagctttggcctccaacgattctgtgctatagatacagcactgtttctggcacgcctcgtgggcattttgaaatatttaacgtttcctcatgatttgcctttgtgtgtgattttagttccacatgatgacttgtgaacattagggatttaaaggaaaaaaaaaaagaattctgttcccctcatatcatgaacacagtaactgataggtaaaaagactgcatgattcacttttacacttatatttcattgctagttaaaaaataaaacctttgagaatctaagatgtacatttttaccttttaggcaatttcaatataatgtagaagtagtagtgtgccctgaaaaatgtacacgttttttcttattgttaccacatgttcacctttatcagcgtggatactgtcagcatgagtacatatttcaacccacgcttgtaaaagacataagagtttatattaaggaccaaattcagttccttggtccttggaagacctatattctctgtagttactgaaaaccgaaagtcaattctaattattcatcttacatatttttccaccatgtcatttgaaaacttgcttttcttctgcataagagattcttatgccaaaaacattaaacagaagaaatcatttttttgctatgtaatacctcgcaactttgctctaaaatcaagctcagttattattttccaagtttgaacatgttaaatatcagatgccttgtaaattatgtctttaacgttttcttatagactaatttcctcttttccacctgccagacttgctaaccaagctcgaaaatgaacatgaaaaagccatacatgtattatttctcctaaaacctaaggcattatctgttggtttggcttgctgctcctattttgtagtcttgatagtagatgcttcttcagcgtaagagtagctatgatattcctttttatcttttcagtacatagtgctgaaaaatctgcaacttcttggatcatatttaatgaattatagtataatgcttgcaggcccagtacaagcatatatattgtgcctcttacagcctttggaatacattgtttccattttttaaatatcttctatatccatatagtattcaaattattaatgctcatgtaccaaggttttgctataaaagttttgtctgtatgaataatgtggctttagtaaataatcatttttcaactgtaaacttattctgaaataaagtaaaattctaattgtttaaatactgtgatgaaaaaaaaaaaaaaaaaaaaaaaaaaaaaaaaaaaaaaaaaaaaaaaaaaaaaaa

SEQ ID NO: 8238 - DNA, 515 bp, Homo sapiens
ttttttttttttttttttttggacatgaaaccaagatttattaaaatactcttagcatatttacaattgaaagccatgaatgcaattctctgtaaattccaaaaaatataattctatctcttaaaacaaattaacagaggtatcaacagattaggataaatataatctatcacagagatagaattttttgaatagacaattgacgtttttctaatcaatatatattatgtacaaaaatacacttgatattgtgaccaagtactgtcaaggaggaaaaaaaatatatatataatacacacatttttattatgtacaaatcagtgttggttccttcactctctttttaaaaataaatacttcatttggttgcaaatgacatttataaattcaactcatgagcatttctcagctttgacaaaattaaatatgcaaacaaattagaaatacgtatttttaaaaatgcaaagggaaaaatacctgaatccaatgagcttattatgcttaaaaatatccca

SEQ ID NO: 8239 - DNA, 8763 bp, Homo sapiens
  misc_feature (1458)..(1492): n is a, c, g, or t
  misc_feature (5513)..(5621): n is a, c, g, or t
ggggtgggagggggagggggacctccgcacgagacccagcggcccgggttggagcgtccagccctgcagcggatcatggtgcagcaggcggagagcttggaagcggagagcaacctgccccgggaggcgctggacacggaggagggcgaattcatggcttgcagcccggtggccctggacgagagcgacccagactggtgcaagacggcgtcgggccacatcaagcggccgatgaacgcgttcatggtatggtccaagatcgaacgcaggaagatcatggagcagtctccggacatgcacaacgccgagatctccaagaggctgggcaagcgctggaaaatgctgaaggacagcgagaagatcccgttcatccgggaggcggagcggctgcggctcaagcacatggccgactaccccgactacaagtaccggccccggaaaaagcccaaaatggacccctcggccaagcccagcgccagccagagcccagagaagagcgcggccggcggcggcggcgggagcgcgggcggaggcgcgggcggtgccaagacctccaagggctccagcaagaaatgcggcaagctcaaggcccccgcggccgcgggcgccaaggcgggcgcgggcaaggcggcccagtccggggactacgggggcgcgggcgacgactacgtgctgggcagcctgcgcgtgagcggctcgggcggcggcggcgcgggcaagacggtcaagtgcgtgtttctggatgaggacgacgacgacgacgacgacgacgacgagctgcagctgcagatcaaacaggagccggacgaggaggacgaggaaccaccgcaccagcagctcctgcagccgccggggcagcagccgtcgcagctgctgagacgctacaacgtcgccaaagtgcccgccagccctacgctgagcagctcggcggagtcccccgagggagcgagcctctacgacgaggtgcgggccggcgcgacctcgggcgccgggggcggcagccgcctctactacagcttcaagaacatcaccaagcagcacccgccgccgctcgcgcagcccgcgctgtcgcccgcgtcctcgcgctcggtgtccacctcctcgtccagcagcagcggcagcagcagcggcagcagcggcgaggacgccgacgacctgatgttcgacctgagcttgaatttctctcaaagcgcgcacagcgccagcgagcagcagctggggggcggcgcggcggccgggaacctgtccctgtcgctggtggataaggatttggattcgttcagcgagggcagcctgggctcccacttcgagttccccgactactgcacgccggagctgagcgagatgatcgcgggggactggctggaggcgaacttctccgacctggtgttcacatattgaaaggcgcccgctgctcgctctttctctcggagggtgcagagctgggttccttgggannnnnnnnnnnnnnnnnnnnnnnnnnnnnnnnnnntgatgatgatgatggtggtgttgatggtggcggtggtagggtggaggggagagaagaagatgctgatgatattgataagatgtcgtgacgcaaagaaattggaaaacatgatgaaaattttggtggagttaaagtgaaatgagtagtttttaaacatttttcctgtcctttttttgtcccccctcccttcctttatcgtgtctcaaggtagttgcatacctagtctggagttgtgattattttcccaaaaaatgtgtttttgtaattactatttctttttcctgaaattcgtgattgcaacaaaggcagagggggcggggcgggggaggggaggtaggacccgctccggaaggcgctgtttgaagcttgtcggtctttgaagtctggaagacgtctgcagaggacccttttggcagcacaactgttactctagggagttggtggagatatttttttttcttaagagaacttaaagaactggtgatttttttttaacaaaaaaagggaccattgcaacttttgttaatttaatttttttttttttttttttttttttttttttggagggagaaaactgatgtcttctatgcatccgattcttaacaaaactgcagggagcttgaaaaaatgcagactgtacaaacgcttacaaaaaaaaaaaaactgtgaactgacttaagatcagagtttacttttcagatcaaattgtttatggttttacaaatgtgatttctacttgccaactttttttttgtaacttgttcccttatacctccttgattgaataccagacagcctagacctcagtacaaaaggtattgaaacatttttgatacataacagacctcagtcttttttaaaaattaatatattttcaggcgtatttttgtacagtgaaaagggaacattcttgctgtgttttttcagtaagactttcaggcacttcttcccttttgatttcttttttttcctctgttttttagcatgcaagtatgttggtacgttatgtcctggtttaaaaaggattaaaattttaaaataatccttgcatctaaaggccttgtggtttaaaaaaaaaaaagcaaacttttttttgtacagctatagtagagatttgttcaatatttgtaggtaaagatttattgaaaatggtgatatagacctcagagctgttatcttagtttaaagattgtatatgtactgtactatagtaggactttatgtatctcatacgctgtgatgtggatggggccccagatggaaggtttgaaactggattctcgatttttagcaaaaaagaaaaaaaaaaaggcacatagtttaaaaagtttctcattttgtgcaatataatctaaataaagtacagaccatctgcatattttgtagcaaatggtggcaaagcagactcaatgcactgtcgacatcattgcctgttttttttttttttttttttgtgctggaagtctgtatcttgacaattttaataaatcagctggaactgatagaaactcgcatcgccaatagtctctatggaagtcaaactggaggtcctgttgtcgcagagcattcggtggtgaggctgttgtgtgcgcggatgaggggaggtggcaggagagaattctacatttagggggttaggctgaaaagtgttcaattagcaggctgatttctttttcctcttccgctagttgtgaaagacaggggaagggtgttctttctctctgccctccctttccatctccagctccccatttcctttctcacctcctcctccactccctgcctcttctccccacccatcctggcgggcgggctgcgcggaggctcgggagctggccggggaggggcggatggaggggcctgggttgccagctcccttggtcggggtcctgctcgctggggcttgtgtgttctctgcggcgggccgcgtccccgctgagcctcgcggtgacagccgcctttggcagcgagcgctcggggcacttctatccccgcctctcaaagggtggggacagccgtttccagatttgaattttttctgttctttatttttaacgctgcatcttcgcgtgtgctcagaggtggttgttggcggagaacgccgccgcagtgtttgacctctagcggtgaagggggaaggggaagaggaaaggagagaagtggtcggtgtctgtttccttctgtcccccggggccgtggagctgtcggagggaaggaggacggtgcggggccgcagggggcgcggggcgcggcgggacccaggctacgagcgggagggaggcgggagtcgggggaagacgcggcaggccggccgagggcaccccgaggaacatggcatggcctctgtgcgatccgagtcgcggtctccggggtgcctgggagggccgaaccactggtgagggcgtggggagcagggggtggcagagggcacccgggcggtagtccgggacgcgcaaggcagagccctgacgctccgggtccccgtgcctggctcttcttgcctcgccaccgcgtgctcctgggcgcgccccgccgcgggcccttgaggcgcgcggagacaccagcgctggcttcccgggcccgcgggccggggagggaagcctcggggctgcggggtgagaggaagaaagcaaacccggggagcaggcggctgccgcacccgcgcaccccgggccctcaccacgccctccccgcgcgccggctcaggggctgccccggaatcagctccccggggccgccgcaacgaaggtggatccgcatcttgattgttctccgggagcctcctgggggctccggcggcggcgcgggcgcgacccatcccgctggcgctccccgctcgctgaaccccgtttgcctgtccacaccccctcgctccccaccatttttcctgaccggcctgtgtccccgagccctcgcggcaggcccgagcaggcgatcgcggccgggcacgcgcgccccgggctcccgccccccttccgagcatccgccgcctcttttctgctgggtctgggaggagggaggctgggaggccgctcggggcccagcgtgccagccccggagttcagcctcccgagctgcggcgcccgcagcggaggaggttttcagtggctgattgaaactcactgcaaaatcaccacgactctttcacctactgagatgattgaccgaggtttggccttccatttttactgagatttggcgagaccgaatggaaccgtccgcaaagtaactgcagctgctaggccagaggggccccggcgcccttcccgcctcccctcccgcttgcttttgccttactcgatcttaccaccacccctcccccggccccccgactgagaactcgggcctctcacccgccccccagcctcccgctctgggcgagcctcctccccagcccccacccctgggatgcgaagccagcaagcttttgctgcagatggacaggtttcttttctgtggctttttcctttcgataaaccatcagatttcagtagtacatttgggaaaagaaggggctgatggcgttaaccaggttctcaatatagaactggatttctggagttgtttaccttaccccacaccccctcaacatgtagactaatgcagccattggtggtacatttattttaaccacggataattgaaccagcggtttacaattgacacgtgctccgtgctggtgattttatgtggcagcctctgctgcagttccgaaacttggtggcaacgtaaacccattgataggctgatctatgtattttgaaagcctgaaaacttggcatgtcttttctgttttaatcatagatgaatcttggacattttctgtggtgaggtggaaactttaagtaaattagtaaagtaataatttggcttcagaatgggaagagatagtcaagattttttttttttaaagccatgtggcctaacttgatacaaaaataaaagtaattgtttggcaatctaaatttaaaacctgttagaactcaggacaggcgcttcaatgcgctttttaacaatattnnnnnnnnnnnnnnnnnnnnnnnnnnnnnnnnnnnnnnnnnnnnnnnnnnnnnnnnnnnnnnnnnnnnnnnnnnnnnnnnnnnnnnnnnnnnnnnnnnnnnnnnnnnnnataaaagtttaattgatttttttttgttggtctcttaagtaagtcttatttttaactaagcattgacagaatatcttaaaatggtaacctgggggtggcgggtgggtgctgtgtgcacggcagcctagccagtggggatcctgctgtttattataagtagttcacagactctgatggcattttggtaagctttccatctttaagaaattgaaccagcattctcttattaattctttaaactgtggaagtaatttccagttcttacactctgatacgcatcccttttatttaaaaaaaaaaaaaatgctaataaaaggcagtgtacttaaactgtgctttgcaaatattgtgtatgttatgaatgactacagacactgggcaaattatttgtagaatgattatcctttagctagagaaagaaatcattacaactcttttgggcagagatgtttctttttaatgttaatcaaggggaagtgatttaaatatgcataaatgtagcagtcagggtgatttagttgcttttttcatgaaagaaaaagactcaaaagacaagacttatttttctcttctgggacttgaaatcataatcatctgatattagtacagtacaagaaatttacatttggtttttacttcagaatttaagtgacttttgcccaaggaatttgagaaataaggcaaataagttgctctattttaaagtagtcattcaatataaatatattatatcaatcttaacttttttattctctgatatgattaataatatgtatattcttacttttcttctaatgggcatatgtatccttgtggacactttgagagaggttttcttggactctcccatttatagaatctttatactcttttactgtgtggttccctgcttttaacagatttctgaggcaaatatatttgtgcttttttcttatgtaggaagaccagcgaaaatagtttactgagttgtcaattttatcagtagataagaaactttctttattacagtttcagggaagattttttcaggatatttctcagttattctaagggccaaattttgtaaaatttccattaggaatgtcagtttcaaataccctttgtatagcctaagcctgtgaggataacaagaatgagccttacctatcctaacacagggatttacaagttcccaaagtaaccgtctccatgtaactcttgacatacttttctgagatttggcttatttttattattggttatttctcactgttcattctatttgatttattctacaacatccccttttatttaatgatctggaaaattctgctctttgataacaactcaggatttttttgtcagttttggtttttgccccttcctgtggagcctacattttcaaccacaataaagatgaaacaaaatttatgaaactgagctctcttccattttacttactgctggcttttttttttttttttttccttgattcctaccataccttcgtttttttcattgtacttttttaacactacctatatccattagctgcctaattagttttatctgttccatgtggatgcagtgagtttataagagaatttcacaaacaagtagttttttagtgaacttaaaataaacagaattttaaaggagacctatttttatactcaataaaagcacaaaagtgcagaaagtataaaacggcttacaaagggagacacaagctcataatgttccatgtataaaagtaataactttattgggtagagatattcttacaagatctagcacctctgccagtgcacagataggactgttttaaatgatttgggaacttttggttgcctgcagttgtgaacagagaacttctctacagagaaacaaaccactaaaagcaatatgaccgagttgagatgtggtttccaatgagcaattggtgaatttaagcaacctggatgtgcatatgtggaggctcccgtctcactgtttgatcaaacttcttttatgtagtcacgtagacttgattttttctgctgtgaaaatgaaaaaataaagcaatatgacaaaaagtttaaaaatgcataaaaaataggatttcctctaggctcctcgaagagatttttttaatatgatgcttgtcttactttcttagacacgttacatttccccttccaaaaaaaaaaaaaaaggacaactggaagtaatttatcatataaagaattttgatcaaatagatattgacaaagggccctctgtcacatttttcttcatccagcttttgttcaaaaacagtatgcctcctcccttgaatcacatagggagaaacgttatactccattctcattaatttcccattttgtctacttttactcttgtacatatgttgtgggtttaagagtcttttgcatttgttctgtgacacctttttttgaattgactgttttaaaacggaggcctttttttttttttttgggactcctagtggttatggcatcccataatgcttcgtgacggccaccaggacagaaccacctgatgttttagagcagttttcagcatgacactgttaacaagtgtgtattttccaaggccacatgaaacttactttcttagccactccaggtttgggagcagaaaagctgaaaaacccttttgtgtagaagtctgagtggtttgtgggggggaccttttttagagtttgcatgccagcgcacggcctattgctgtgaaacagagagaaggtaaagctacctgaggcagtgcgctggaggatgaagtgtttgatagcactaggggggaaagaaaatgcatggcaaagtttcgtcttctcgtagactatctagcatgcagagtgtagtgtgttgaaacggtgtatgacattgctgtatcaaagttgtaaaattaagcattatttattgaaaactatgtatttttttgtaaaaacctgatcacatagagaatatcagtggcttgtgcttgtgcttcgatctaaccagcttcttgacccacccccccttggtatgcagtgttaatgctcagggttgaaaatagtacactccaatgtctcttttgcaagagtttttcacagaggattacatttgttcaaaagactctaataaaattgtgtgatcaatcttcaaaaaaaaaaaaaaaaaaa

SEQ ID NO: 8240 - DNA, 1156 bp, Homo sapiens
tttttttttttttttatagtagaaaaggtgctttattttacatatcattggtacacgatacataaaactgcctaaaatcagtcttgaaaaacacaacagtcagtcagttacaccttaaagggtcaaagaccaagtctattttgcaagctacttcatttatgatcaaatgactacaataattttaaatactaataatgtcttcatatccaatgttacaaatgatttttgttacaagggctgtaattttttaaaataaaaatatctttagctatagaccttatttctaatcagaatgaatctttgctagtctacaagtctttgaaataatagatcaacaatttcaccttcctatagataattgtatttatgtaattgggtaatgaggcaggagtccttcatacatgcaatcagattatttcaattttttaaaaaatgcagataaaattgagtttatatataccctatgtctaattaagttgccaaagaagtttattaaactaaaatgaagccaatatgatattttagaaaacataattctgagagcatgcaacatcaaaaatatttttactacttatgagagccagagttgcagaacacagaagaggactggcacaaagtcttgttatatttgaactgcttacctgactgggaagagtaaagaaagtcatttaactcagtgcaaatcctatgaaaaatatctgcatgatacagcctactgctacacaaagggatcttcatttagaaaatgtgcaaatcataagaagctaaatgcacttctcttgctatttgctccaattcattctattcatcagcacacagctctaagatctcttattaactactaatgtcaaagccacagagatttcttaatggcattttttagtcagcaatcccttatcacagagataaatatgactggtgcttaatgtacaaatgccaaaaaaaaaaaaaaatagaatctgggctaagtctcagggcaaaaacatttatgattttaacaaatccctcagtatagaaagacttctcttccctctaaacagttaagtcatatgttagaaccacaggttcagaatcacctcctgatccagaagagtggaggcttaactgaatcaaatactaaacaggtataaatgtgcacactcaaacaaatattcta

SEQ ID NO: 8241 - DNA, 1714 bp, Homo sapiens; identical to SEQ ID NO: 6791

SEQ ID NO: 8242 - DNA, 2692 bp, Homo sapiens
  misc_feature (1210)..(1244): n is a, c, g, or t
  misc_feature (1862)..(1878): n is a, c, g, or t
acacggtaagagggagagcccaggtttgaacaagtctatctgattccaaagcctaaggtccttcttagcactcttcagcctgtttagataactggggaaggggagggtgggtgctctcccagaagcatattcattcagtaaactcagagcatctattttgtgccactctgcacggtactgaacgtacaaagatgatgaagtggtctctgtgggccttgggagcccatgttcaaggcaggaccattggaaaacagcatccctcatccttgacccggatggggcaggacattgatgaatcgtgatggagggggtgactatgggatgcttcaaaaaaaggcttcctggaggagatgacatttaactgaagcacatggacatttccaagaaaaatagagtaaggcagggatcaagaggcagagggaaaaccattagcaagaattcagagtccagaggccagcagaggagacacatggtgaccaacaccaagaaggagactcgctttcagtggttcttccagagggcagagatgccagatggtcagtatgacccagagacgggaacgggacttctctgcattgaagagttgtccaaaaaggacaagggaatttacagagcgatggtttctgacgatcgaggggaggacgacaccatattggacctcacgggtgacgccctggatgccatcttcaccgagttgggcaggattggtgccctctctgcaactccactgaaaatccaggggaccgaggaagggatccggatcttcagcaaggtcaagtactacaacgtggagtacatgaaaaccacctggttccacaaagacaaacgtctggagagtggtgatcggataaggacgggcaccaccctggatgagatctggcttcacatcctggaccccaaagactcagacaagggcaaatacactctggaaatagctgcagggaaggaagtccggcagctctcaacagatctctcagggcaagcttttgaggatgcaatggctgaacaccagagactgaaaaccttggccatcatcgagaagaatcgtgccaaagtggtgagaggtctgccggatgtggccactatcatggaagataggaccctgtgcttgacttgcatcgtctcaggagaccccacccctgaaatctcttggctgaagaatgaccagcctgtcaccttccttgaccgataccgcatggaagtgaggggnnnnnnnnnnnnnnnnnnnnnnnnnnnnnnnnnnngtgaagacagcggccgctacggcgtcttcgtcaagaacaagtatgtctccgagacgggccaggtcaccatcagtgtgttcaagcacggggacgagcccaaggagctgaagagcatgtgacagcgtgtgtccaggcacagtctgagtctagtctgcatggaccagtagggacaacctgtaccagggtcacagcctggcacaggctacaggggtggggcagaaggaaaggggacaagatagaacccaggatgtgagggtgggggtggagcggatgcaccaaagtggagaagcaaagatctttctggggtcctgagtggcttccaggagagcgggatgaaccctggacctggagtaggagacccggatgcactggggctatctaacagtactggcatctgataggtagaggtcaggtacgctgctaaacactgcagctcccaccacatagaattatccgaccccagatgtcaaaagtgccaagggccatgagccctgccataaactgatacatcgcacccctcttttaggatcccatagtttcaattcatgtaagttcaacagacacctgaagtctagcatgtgggaggctgaggatggagctgggaacacaaaggcagcnnnnnnnnnnnnnnnnnttgcaaagaggcctcagtccagtgggagaaacagacctgggcgcaaacaactccaggacaaggcaggacatgataaagattataaagcaggtccaaggaaagtgccgccagtggtccaaggagggagacagagggtcgtcccaacagggggaggtagggctttgaaaacaccttcatccaggctgggcgaggtggctcacgcctgtaatcccagtagtttgggaggccaaggcgggcagatcacctgaggtcaggagttttagaccagcctggccaacatgacgaaacccggtctctactaaaaatacaaaaattagccaggcgtggtggcaggtgcctgtaatcccggctattcagaaggccgaggtgggagaatccgttgaacctgggaggcggaggttgtgatgagccaagattgagccaaaaaaaaattagcagaattggtgttgggccctgaaaaattagtccgattttgtggtggtaatgggagaaggacatcccaggagcagggtctggtgggaggaaagggaaggaggaggctaaggctgcccaggaggccttggataccaggcttggagctggtaacctccagggcttccagcacggggcctctgcctggtgtgacagataccggctggcctcacttgatggatctcagtactgagctgggcatttctctgccccccaacttttttctttttaaaaataagatggggagtgttcataaaattatagatgtttgttgtaaaattttggaaaaccctggaaattatagagaaaataaacataatctatactcccaacaccacaaagt

SEQ ID NO: 8243 - DNA, 3191 bp, Homo sapiens
  misc_feature (643)..(685): n is a, c, g, or t
  misc_feature (1195)..(1214): n is a, c, g, or t
gcacttcccctctgctggcacgaggcggtggacggtctgaaagggagtgttcgggtttcgctggggcctcgcggctccagagcccagcatggcttcctcgcgagcctcttccacgcaggcaaccaaaactaaagcacccgacgacttagttgctccggtcgtgaagaaaccacacatctattatggaagtttggaagagaaggagagggagcgtctggccaaaggagagtctgggattttggggaaagacggacttaaagcagggatcgaagctggaaatattaatataacctctggagaagtgtttgaaattgaagagcatatcagcgagcgacaggcagaagtattggctgagtttgagagaaggaagcgagcccggcagatcaatgtttccacagatgactcagaggtcaaagcttgccttagagccttgggggaacccatcacactttttggagagggtcctgctgaaagaagagaaaggttaagaaatatcctctcagttgtcggtactgatgccttgaaaaagaccaaaaaggatgatgagaagtctaaaaagtccaaagaagagtatcagcaaacctggtatcatgaaggaccaaatagcttgaaggtggcaagactatggattgctaattattcnnnnnnnnnnnnnnnnnnnnnnnnnnnnnnnnnnnnnnnnnnnactccataaggagattcctgagacaacaaggacctcccagatgcaagagctgcacaagtctctccggtctttgaataatttttgcagtcagattggggatgatcggcctatctcctactgtcactttagtcccaattccaagatgctggccacagcttgttggagtgggctttgcaagctctggtctgttcctgattgcaacctccttcacactcttcgagggcataacacaaatgtaggagcaattgtattccatcccaaatccactgtctccttggacccaaaagatgtcaacctggcctcttgtgcggctgatggctctgtgaagctttggagtctcgacagtgatgaaccagtggcagatattgaaggccatacagtgcgtgtggcgcgggtaatgtggcatccttcaggacgtttcctgggcaccacctgctatgaccgttcatggcgcttatgggatttggaggctcaagaggagatcctgcatcaggaaggccatagcatggnnnnnnnnnnnnnnnnnnnncatcaagatggctctttggctggcactgggggactggatgcatttggtcgagtttgggacctacgcacaggacgttgtatcatgttcttagaaggccacctgaaagaaatctatggaataaatttctcccccaatggctatcacattgcaaccggcagtggtgacaacacctgcaaagtgtgggacctccgacagcggcgttgcgtctacaccatccctgctcatcagaacttagtgactggtgtcaagtttgagcctatccatgggaacttcttgcttactggtgcctatgataacacagccaagatctggacgcacccaggctggtccccgctgaagactctggctggccacgaaggcaaagtgatgggcctagatatttcttccgatgggcagctcatagccacttgctcatatgacaggaccttcaagctgtggatggctgaatagatgacaatgggaaaaggacttgaacctcaagctctctctaaggagctgttttcctcaaacgagaagaattgaagtgtttagttctatcatgttttctgccaattaccatgcatagaccctcagtagaattggatttccatgtcagcccccactccaggaaggcagcccaatccctaggtgatggggaacccctctcacggttgaaaatttattacctttttacgccctgccacgaactgtgtagacattgtttttattaatcttttgtttggccgggcgtggtggctcacgcctgtaatcctagcactttgggaggccgaggtgggtagatcgcttgagctcaggagttcaagacgagcctgggcaacatggcaaatgccgtctctgcaaaaaaatactaaaattagctggtcgcggtggcttctgcctgtgattccggctacttgggaggctgaggtgggagggattgcttaagcctgggaggcagaggttgcagtgagccgagattgcgccattgcactctagcctgtgtgacagagcaagaccctgtctcaaaaaaaaaaaaaatttgttcgaatgccttatagccttcctcacagcacccaggattgtgactgactctgcatttttaattcttgaaacttggctttccataacatggtacatgcttcaggactacatatgacccagagagcaaggtggctgaactatagtctggaagccctcaggtaaagaggcacatctcaccactcattggttaaacaatgcatcatagcgagcacttttcctttccctggagaatgggatgtgaagcagtagaccgcagccacgccgatggttatacagtgaagaagacttcacctcttcctattgagtttgcttggaatgctgacagcatcaggcaactctgaactgaacatttgctttgtcagaaaatatctttttttttactttgaagtttggcaaccttcatgttaccccaaagcaaaaccattgtgtcaggagtcaaacaaatgtttagaaagcaaacatgacgtctctattgtacaacctcctttctcttggctgtttaaaggatgtacttcgtgtattaaagggtactttatgttgaagtaaaaaaaaaaaaaaaaaaaaaaatcctaaacctaaaccttttctttattccacatttgctacggtaaaatcctgttacaaaactaccctataaagaattattttctatagttaagcattttctgaatcctagccattggtccatagaggtctcttttttttggtttgggatataatggatgatctcaaatatggattactctgatttatgtctccttagcaccttgttaacaattttttttaaaatagaaggctgtttgcattttgggccagactgccagtaagccaggcctggactcaattacaattcttaacttgtctgtcatgcacctcttttcacctcaactatacagcctctgaactctcaaattacacagtaaattcaaaaaaatatataggaatctggaagaagac

SEQ ID NO: 8244 - DNA, 1972 bp, Homo sapiens
ttctctttgctgaggcttacttgtccagcctattgtttgagacaacagatataagttgcgatgggagaggagcgtcggatttggtgtgtatcccccatttccaattatagatggatcattacagacagcggagtcctgagaagccagacatctgctcctcacatgaatgcactcacctcctagagaccaggctgccatcatgctctggaagcttgtggagaatgtcaagtacgaagatatctatgaggaccggcacgatggtgtcccgagccacagctcgcggctctcccagctgggctcggtgtcccaaggaccctactcgagcgccccgccgctgtcccacaccccgtcgtcggacttccagccgccctacttcccacccccctaccagccgctcccctaccaccagagccaggacccctactcccacgtcaacgacccctactccctgaacccactgcaccagccccagcaacatccctgggggcaacggcagcggcaagaagtgggttcggaagccggctctctcctgccccagcctcgggccgccttgccccagctctcgggccttgacccccggagggactaccactcggtccgccggccggacgtgctgctgcattcggcgcaccacggcctggacgcgggcatgggtgacagcctctcgctgcacggcctcggccatcccggaatggaagacgtccagtcagttgaagatgccaataacagcggcatgaatctattggaccagtctgtcattaaaaaagttccagttcctcccaaatcggtgacttctctaatgatgaataaagacggcttcctgggaggcatgtctgtcaacaccggcgaggtgttttgctccgtcccaggccgtttgtctctgctcagttcaacttcgaagtacaaagtaactgtgggagaagttcagagacggctgtcgccccctgaatgcctcaatgcatctctcctcggcggagtcctcagaagagccaaatcgaaaaatggggggagatctttgcgagaaaggctagaaaaaatcggtttgaatttacccgcgggcaggcgcaaagcagcaaatgtcacgttactcacctccctggtggaaggagaagctgttcacttagctagggattttgggtacatttgcgaaacggagtttcccgccaaagccgtctctgagtatttgaaccggcagcacacagacccgagtgacctgcactcccgaaagaatatgctgttggccaccaagcaactttgtaaagaatttacggatctactggcgcaggaccggacaccgatagggaacagccgacccagcccatcctggagccggggatccagagctgcctcacgcacttcagcctcatcacgcacggcttcggcgccccggccatttgcgccgcgctcacggccctgcagaactatctcaccgaggcgctcaaaggcatggacaagatgttcttgaacaacaccaccactaacaggcacacgtctggggaaggcccaggtagtaaaactggcgacaaggaggagaaacacaggaaatgaaaaatttttaaaaaaagaaggaaaaatgttttaaatacaaaaggaaaaacagacaaaaatttaattttagctttaaaatattggattggctttggaagaattatattaggtagaatacacatacaatcaaaatttaaaaaaaaaaagctaaataacttaaaaaaaaactgaggcgtacaacggagcaacaatatcggttctcagtgtctatttcaagatacatttggagacaaccgtccggattttccacttcggttctttcgagtttagtaatactgataataaaagaaaaccatgatttccccttccctttggaaaataaacataagactatacatgagaaaaacgctaacttattggaagaaaatcggagaaacgttggtgtcaatgtctttgagagtctggctgatctgagacgcacgac

SEQ ID NO: 8245 - DNA, 589 bp, Homo sapiens
  misc_feature (121)..(138): n is a, c, g, or t
aagattagaaaaagaaaaagaagcaaagatgttgaaaacaaagacgtacattgatcattccttaatgcagtaatgtgttaaaaggaaaagatttttaaaccattaagcgcaggaaaacagnnnnnnnnnnnnnnnnnnatggaaaatttgacattcagtgactgaagcattggtatgataatttctaacacttgtagaaggtccatgactgtaattttaccaatgaaaagcatttaactgttttggattccaaactagcagcactacaatgctttgctagagctggtaaaatggaaccaaatcgcctcttcaatggatttggtccccttcaaccagctgtagctatgcattgattactacgggacaaccaacgttttcatttgtgaatatcaattacttgccaactaatttcaacttatttacattatgcagactgtgattataatcaaataacttgttactgttaattctacctggaaaagctagaatggttaaagatgtttataaaaagctttatgaaaaatgtatggatgacttaaggatttcaaataaaaattttacttattatggaaaaaaaaaaaaaaaaaaa

SEQ ID NO: 8246 - DNA, 4371 bp, Homo sapiens
  misc_feature (3076)..(3105): n is a, c, g, or t
cgcacctgctgcaggtgctcccggccgccccggaccagcgagcgcgggcactgcggcggggaggatgctgcgcgagcggaccgtgcggctgcagtacgggagccgcgtggaggcggtgtacgtgctgggcacctacctctggaccgatgtctacagcgcggccccagccggggcccaaaccttcagcctgaagcactcggaacacgtgtgggtggaggtggtgcgtgatggggaggctgaggaggtggccaccaatggcaagcagcgctggcttctctcgcccagcaccaccctgcgggtcaccatgagccaggcgagcaccgaggccagcagtgacaaggtcaccgtcaactactatgacgaggaagggagcattcccatcgaccaggcggggctcttcctcacagccattgagatctccctggatgtggacgcagaccgggatggtgtggtggagaagaacaacccaaagaaggcatcctggacctggggccccgagggccagggggccatcctgctggtgaactgtgaccgagagacaccctggttgcccaaggaggactgccgtgatgagaaggtctacagcaaggaagatctcaaggacatgtcccagatgatcctgcggaccaaaggccccgaccgcctccccgccggatacgagatagttctgtacatttccatgtcagactcagacaaagtgggcgtgttctacgtggagaacccgttcttcggccaacgctatatccacatcctgggccggcggaagctctaccatgtggtcaagtacacgggtggctccgcggagctgctgttcttcgtggaaggcctctgtttccccgacgagggcttctcaggcctggtctccatccatgtcagcctgctggagtacatggcccaggacattcccctgactcccatcttcacggacaccgtgatattccggattgctccgtggatcatgacccccaacatcctgcctcccgtgtcggtgtttgtgtgctgcatgaaggataattacctgttcctgaaagaggtgaagaaccttgtggagaaaaccaactgtgagctgaaggtctgcttccagtacctaaaccgaggcgatcgctggatccaggatgaaattgagtttggctacatcgaggccccccataaaggcttccccgtggtgctggactctccccgagatggaaacctaaaggacttccctgtgaaggagctcctgggcccagattttggctacgtgacccgggagcccctctttgagtctgtcaccagccttgactcatttggaaacctggaggtcagtcccccagtgaccgtgaacggcaagacatacccgcttggccgcatcctcatcgggagcagctttcctctgtctggtggtcggaggatgaccaaggtggtgcgtgacttcctgaaggcccagcaggtgcaggcacccgtggagctctactcagactggctgactgtgggccacgtggatgagttcatgtcctttgtccccatccccggcacaaagaaattcctgctactcatggccagcacctcggcctgctacaagctcttccgagagaagcagaaggacggccatggagaggccatcatgttcaaaggcttgggtgggatgagcagcaagcgaatcaccatcaacaagattctgtccaacgagagccttgtgcaggagaacctgtacttccagcgctgcctggactggaaccgtgacatcctcaagaaggagctgggactgacagagcaggacatcattgacctgcccgctctgttcaagatggacgaggaccaccgtgccagagccttcttcccaaacatggtgaacatgatcgtgctggacaaggacctgggcatccccaagccattcgggccacaggttgaggaggaatgctgcctggagatgcacgtgcgtggcctcctggagcccctgggcctcgaatgcaccttcatcgacgacatttctgcctaccacaaatttctgggggaagtccactgtggcaccaacgtccgcaggaagcccttcaccttcaagtggttgcacatggtgccctgacctgccaggggccctggcgtttgcctccttcgcttagttctccagaccctccctcacacgcccagagccttctgctgacatggactggacagccccgctgggagacctttgggacgtggggtggaatttggggtatctgtgccttgccctccctgagaggggcctcagtgtcctctgaagccatccccagtgagcctcgactctgtccctgctgaaaatagctgggccagtgtctctgtagccctgacataaggaacagaacacaacaaaacacagcaaaccatgtgcccaaactgctccccaaagaattttgagtctctaatctgacactgaatgaggggagaagggaaggagattctgggattgccagtttcttcccgcaaccatgctctgaaaatcaaggtagaatccatggaaagggaccccaggaccccgggaccctagacgtatcttgaactgccatcgtcatttcaaatacatctccctcagggtttccaggtggccacccccaattattcattccttaccaacctctcaaatcctcttggctttctctctgcagtgtggacactgttggctagtcctccccactccctgagggtccagtaagttagcttagaaccttcctggaaacatttcatctgagcaggtttccccacgtgtgggatgctccttttgcctcatctgtctcagggatgcaggctcccccgcatgcatggggatttctccccagaccagcatacttgtgacctgagagttcaatgcgtaaagatgcccctggtcagccatatccatcttctcttgcctggtccttgattctctggccgctccctgaccttcctccttccactgccttgactttcttcctttttattcctggtgccatctgtccaggcagctagacaagaacttgttcgccagcagccagattcaggccttcccaggggcataataagtgaccagcccctcctctccggacatcagatccaacacataaggaccctggcctacccnnnnnnnnnnnnnnnnnnnnnnnnnnnnnntgccaacttaggggtggtttgattatcccattgaaattcaccagtgcctttgccaaagaccctctcatttggacatacccagattcattccctggctccaactgaaaagactcagtttcaatcgttaaaagttcctttagggccagaagaataaatgaattataatcccattttgaagaaccgatttataaccaatgaaaaggttataatgtaatttatattcttggaggaacaagattttcatttgggattatttccttcaaccattcaacaaacatttgttgtatgccactaagcgccaggcacggcgttgggctctgcaaacacagtggttagtagcagtctggacctggtccctactggcatggaacccatcactccccaacatgcaaagcccacatttaaaggccagcctctgccccttcagtgatgcgctctttagaaatgccagcccactatattcagaaatccgcagggcacaaaacttccagcaagtcactgttgtggtgaaatgggcagtgggggtggggggtcttctttaaacaggcccccttcccatctacctagccagtacccatccaatgagtccccagagcctccagaagctgttgtctcctctctggggacagcagctcctgcctttggaggccaaagccccagatctctccagccccagagctgaaaacaccaagtgcctatttgagggtgtctgtctggagacttagagtttgtcatgtgtgtgtgtgtgtttggttaatgtgggtttatgggttttctttctttttttttttttttttttagtctacattagggggaagtgagcgcctcccatgtgcagacagtgtgtctttatagatttttctaaggctttccccaatgatgtcggtaatttctgatgtttctgaagttcccaggactcacacacccgttcccatctcacttgcccacccagtgtgacaaccctcggtgtggatatacccccgtggactcatggctcttccccacccccactttctataaatgtaggcctagaatacgcttctctgttgcaaaactcagctaagttcctgcttccaccttgatgttgaaatatcttatgtaagagggcaggggatgtcgtgaagatggcaagaagaacacagtttcaaatttctggaaaagagcctgtggtggagatctaaagatgtttagggaagagctcgactaaagaacaatgaaataaatggtccaaggggaagtcaaaaaaaaaaaaaaaaaagaaaaaaa

SEQ ID NO: 8247 - DNA, 3246 bp, Homo sapiens
gccggtaagtcgtccagcggagacggctgcgagccccgcggccgggtggggtgaggtggggtgcgcttccggggaaaggcacgaggcccctcccggcttcggagccgccgccactcgtctctgcccagctgctgccctccccaggaggcctccatggcttcacctacctccaccaacccagcgcatgcccactttgagagcttcctgcaggcccagctgtgccaggacgtgctgagcagcttccaggagctgtgtggggccctggggctggaacccggtggggggctgccccagtaccacaagatcaaggaccagctcaactactggagcgccaagtcactgtggaccaagctggacaagcgagcaggccagcctgtctaccagcagggccgggcctgcaccagcaccaagtgcctggtggtgggtgctggaccttgcgggctgcgggtcgctgtggagctggcgctgctgggggcccgagtggtgctggtggaaaagcgcaccaagttctctcgccacaacgtgctccacctctggcccttcaccatccacgacctgcgggcactcggtgctaagaagttctacgggcgcttctgcaccggcaccctggaccacatcagcatcaggcagctccagctgcttctgctgaaggtagcattgctgctgggggtggaaattcactggggtgtcactttcactggcctccagccccctcctaggaaggggagtggctggcgtgcccagctccaacccaacccccctgcccagctggccaactatgaatttgacgtccttatctcggctgcaggaggtaaattcgtccctgaaggcttcaaagttcgagaaatgcgaggcaaactggccattggcatcacagccaactttgtgaatggacgcaccgtggaggagacacaggtgccggagatcagtggtgtagccaggatctacaaccagagcttcttccagagccttctcaaagccacaggcattgatctggagaacattgtgtactacaaggacgacacccactactttgtgatgacagccaagaagcagtgcctgctgcggctgggggtgctgcgccagcccttctggcccctgggcactggagtggcacggggcttcctggcagcctttgatgcagcctggatggtgaagcggtgggcagagggcgctgagtccctagaggtgttggctgagcgtgagagcctgtaccagcttctgtcacagacatccccagaaaacatgcatcgcaatgtggcccagtatgggctggacccagccacccgctaccccaacctgaacctccgggcagtgacccccaatcaggtacgagacctgtatgatgtgctagccaaggagcctgtgcagaggaacaacgacaagacagatacagggatgccagccaccgggtcggcaggcacccaggaggagctgctacgctggtgccaggagcagacagctgggtacccgggagtccacgtctccgatttgtcttcctcctgggctgatgggctagctctgtgtgccctggtgtaccggctgcagcctggcctgctggaaccctcagagctgcaggggctgggagctctggaagcaactgcttgggcactaaaggtggcagagaatgagctgggcatcacaccggtggtgtctgcacaggccgtggtagcagggagtgacccactgggcctcattgcctacctcagccacttccacagtgccttcaagagcatggcccacagcccaggccctgtcagccagacctccccagggacctccagtgctgtattattccttagtaaacttcagaggaccctgcagcgatcccgggccaaggaaaatgcagaggatgctggtggcaagaagctgcgcttggagatggaggccgagaccccaagtactgaggtgccacctgacccagagcctggtgtacccctgacacccccatcccaacaccaggaggccggtgctggggacctgtgtgcactttgtggggaacacctctatgtcctggaacgcctctgtgtcaacggccatttcttccaccggagctgcttccgctgccatacctgtgaggccacactgtggccaggtggctatgagcagcacccaggagatggacatttctactgcctccagcacctgccccagacagaccacaaaaaggaaggcagcgatagaggccctgagagtccggagctccccacaccaagtgagaatagcatgccaccaggcctctcaactcccacagcctcgcaggagggggccggtcctgttccagatcccagccagcccacccgtcggcagatccgcctctccagcccggagcgccagcggttgtcctcccttaaccttacccctgacccggaaatggagcctccacccaagcctccccgcagctgctccgccttggcccgccacgccctggagagcagctttgtgggctggggcctgccagtccagagccctcaagctcttgtggccatggagaaggaggaaaaagagagtcccttctccagtgaagaggaagaagaagatgtgcctttggactcagatgtggaacaggccctgcagacctttgccaagacctcaggcaccatgaataactacccaacatggcgtcggactctgctgcgccgtgcgaaggaggaggagatgaagaggttctgcaaggcccagaccatccaacggcgactaaatgagattgaggctgccttgagggagctagaggccgagggcgtgaagctggagctggccttgaggcgccagagcagttccccagaacagcaaaagaaactatgggtaggacagctgctacagctcgttgacaagaaaaacagcctggtggctgaggaggccgagctcatgatcacggtgcaggaattgaatctggaggagaaacagtggcagctggaccaggagctacgaggctacatgaaccgggaagaaaacctaaagacagctgctgatcggcaggctgaggaccaggtcctgaggaagctggtggatttggtcaaccagagagatgccctcatccgcttccaggaggagcgcaggctcagcgagctggccttggggacaggggcccagggctagacgagggtgggccgtctgctttcgttcccacaaagaaagcacctcaccccagcacagtgccacccctgttcatctgggctgcctggcagagagccttgctgtttacaattaaaatgtttctgccacaaaaaaaaaaaaaaaaaaaaa

SEQ ID NO: 8248 - DNA, 1889 bp, Homo sapiens
  misc_feature (942)..(956): n is a, c, g, or t
  misc_feature (1763)..(1763): n is a, c, g, or t
cacttaacacactcttgatgacatatggcaggttcttggtattgacacccgtgtggctgcaggtggcatgaatcatgcatggcttgtctggatctgtcttctgcagagcccattctctctgtcttttgctagtctggactggagagcaacttccctgagtcaggactcttgctgctaattgcagaaaaccagcagtctctgtgaagttgtggtgttctcagagttcagctgtaaaatatagaatcctcattaattgtatttacaactatattgagcaaaccaatgttgttctttattaatgtacagaccaaaaaagacacctcaaaagaaaggacgtacgcgtttcttgtaaacacgaggcaccccaagataagaagacagatagagcaagggatggacatggtcatctcctcagtgattggagaaagttaccggcttcagtttgattttcaagaggcagtgaagaatttcttccccccaggaaatgaagtggttaatggagaaaatttaagctttgcatatgaattcaaagctgatgcattatttgatttcttctattggtttgggctcagtaattccgttgtaaaagtaaatggaaaagttcttttaggttcaatagatgatgtttttaactgcaatctgtcacccagatcatctctgacagagcctcttttggcagaattaccatttccaagtgttctggaatctgaagagacacccaaccaatttatctgattgaactgaacattgtagcagttgctcccgcactccaggcctgtgctagactataggctggggggagggtaggaggtgggaggcagatacttccacctgcgtgtcaatctccggctcctccatggcttctatggaggactcctctcttctgcttctgtggatgtgatgccctggcaggcccagggcagctgattcccctaaaacttnnnnnnnnnnnnnnngaaaggccttggtcccatggcactgggtggggctgggggatattctctactttgaacacttctcccaagaggcagaagggccacagagttctgccaccctgaacatttttctcagttccctgggagtttttgtggcagcctttgtgggagtggtctgactggctgttgacctagcatgcttcataaatcagggtttggccctctgcttggagcatccaaccccttgaactcaaacctgtcgagcaaggggttaagagttctgttctcttgccaacctggctgggcaaaagcctgtgccatctttcactgggaggcaaatatgtttttcatcctgccatatgacacctatgagaaacgttcacagtgaggagtagccaggttgctaggacagtaaccctgccacacactgcctgaaatcggaactcccttggcctccctcttaactaagtgacccatgtagaaggaagccaggagatatggtaccgaacaatgacaggggaagggtattggacacggcagcgtcctccttattgaaaacacattatgtcagttgggaattttaaataagcttttagcaaacctaacactaaaagcaaaatagaagaaagctataccattaccataatacatttttcatctcatggctacaatggaattcttgaaaaggaaaaaaaaatcctatctacatataaaaacctgcatgaatgaatcactacatatgcttataatgaggaagagttatgggtcctgagtgtaattttttatcctttcttaaaaagtttctgtattatgcattttgataacacnactgatgatccttccacttatatttgaaatgttatgtaccacatttgcacaattaaaacttttcttagcattcaacctagaattgattaaatttatgactgaggcttcaaaaaaaaaaaaaaaaaa

SEQ ID NO: 8249 - DNA, 1835 bp, Homo sapiens
  misc_feature (1772)..(1772): n is a, c, g, or t
  misc_feature (1823)..(1823): n is a, c, g, or t
  misc_feature (1829)..(1829): n is a, c, g, or t
gggagtcttacaggggcggagcttaaggtgccggaggtctcaggggaggggcctgggggcagcggcttccgtcctggctgtgagcctggaactgaaaaatgcccgaaagtggggcggggcttgagagtctaggtggggcccaggccgggtcgcggccctttcaccactcccacccgtcacctcgccgtgtctgctgacccccaggaggccaactactacggctcgctgactcaggcgggcaccgtgagcctgggcctggacgccgagggccaggaggtgttcgtacccttcagcgcggtgctgcccatggtggcgcccaacgacctcgtgttcgatggctgggacatctcgtcgctgaacctggccgaggcgatgcggcgcgcgaaggtgctggactgggggctgcaggagcaactgtggccgcacatggaggccctgcggccccggccttctgtttacatccccgaattcatcgcggccaaccagagcgcgcgcgcggacaacctcatcccaggctcgcgtgcgcagcagctggagcagatccgcagggacatccgagacttccggtctagcgcggggctggacaaagtcatagtgctgtggacggcgaacacggagcgcttctgtgaggtgattccaggcctcaacgacacagccgagaacctgctgcgcaccattgagctcggtctggaggtgtcgccctccacgctcttcgccgtggccagcatcctggagggctgtgccttcctcaatgggtctccgcagaacaccctggtgcccggagctcttgagctcgcgtggcagcaccgggtttttgtgggcggagatgacttcaagtcaggccagaccaaagtcaagtccgtgcttgtggacttcctcattggctccggcctcaagaccatgtccatcgtgagttacaaccacctgggcaacaacgatggggagaacctatcggcgccattgcagttccgctctaaggaggtgtccaagagcaacgtggtggacgacatggtgcagagcaacccagtgctctatacgcccggcgaagagcctgaccactgcgtggtcatcaagtatgtgccgtacgtgggtgacagcaagcgcgcgctggatgagtatacctcggagctgatgctgggcggaaccaacacactggtgctgcacaacacgtgtgaggactcgctgctggccgcacccatcatgctggacctagcgctgctgaccgagctgtgccagcgcgtgagcttctgcactgacatggaccccgagccgcagaccttccaccccgtgctgtccctgctcagcttcctcttcaaggcgccactagtgccgcccggcagcccggtggtcaatgcgcttttccgccagcgcagctgcatcgagaacatcctcagggcctgcgtggggctcccgccacagaaccacatgctcctggaacacaaaatggagcgcccagggcccagcctcaagcgagttggacccgtggctgccacctaccctatgttgaacaagaaaggaccggtacccgctgccaccaatggctgcaccggtgatgccaatgggcatctgcaagaggagcccccaatgcccaccacctgaggccccggtcacacagtttctcggctcttcctccccgctgccccccacgaccctaccttgaaggcccccacaaataaaggcgctgccactcaaaaaaaaaaaaaaaaaaaaaaaaaaaaaaaaaaaaaaaaaaaaaaaaaaaaaaaaaaaaaaaaaaaaaaaaaaaaaaaaanttttttgggggcccaaggttttttcccttttggtgggggtttttttttggntttggntttggg

SEQ ID NO: 8250 - DNA, 1100 bp, Homo sapiens
  misc_feature (236)..(249): n is a, c, g, or t
tcagaaggttttgcaggactgggaacgctttagtgtcatcaacagtaaacctcagatactgttctgcacagttcagaagtaccataccaggtattgtgagtggcaagaacgccaggggacagagatgcttctggtagatgagggccagagaaaccagctctcctccattttgacagcaatttctcactgtggccattggcctccattatgttttgagaggaatttcttgagatctnnnnnnnnnnnnnngattaggccaattgtcaatcagtattcagaaactagaaaggaacaatgagatacttgtttatggttctttagggcatatgtttgaaaaccctctcatctcagatctgtatagctggtgtgtgtttgtgtccataaatacacgtgcattgctgtcgtgcccattaagaaagggggagtaagtaaaagaggaatcgctcagatctttccttggatgaacagcagtggcgtggttggtgtgttgactgtgaacaggctgacttagctgttgatgtatactcagaacctccatctcctcccagaccctgcacttttccttctctgcagtctgattctctaatgactgtcactggacaaaccccagttttatgctcgcttagtaaaaataagtttaaacatttcatggtggttgacagaactttgtccccaaacatgcggattcaattccttaaaactcgttgaacgtttataccaaaggtcccgccccgcaggtgtgtatgtggtgcacagagggtgaggtttggagcatcgggcactgtgtgcattgctaaggggacatagtgagacaatgtgggatttaactaaaaacacatcaattgtgtgtcacattaccagtgttgtcaggtatttgttcttaattgttattgtaatatattttcagttgtttttctaatttaattctctccgtctgttgtctgactgtgaactgctaacagtgttaaacttgatgtaaataaatgaggcccttgaaagggactgctttctctgtcttctcacaaggtttgccaagttgtgttctgttttaaataaaggttgcaatattttattggcaaaaaaaaaaaaaaaaaaaaaaa

SEQ ID NO: 8251 - DNA, 4455 bp, Homo sapiens; identical to SEQ ID NO: 4978
  misc_feature (2512)..(2526): n is a, c, g, or t

SEQ ID NO: 8252 - DNA, 5541 bp, Homo sapiens
  misc_feature (190)..(212): n is a, c, g, or t
  misc_feature (489)..(528): n is a, c, g, or t
  misc_feature (729)..(781): n is a, c, g, or t
agcgtctctgtctgccagggtctccgactgtcccagacgggctggtgtgggcttgggatcctcctggtgacctctcccgctaaggtccctcagccactctgccccaagatgggccgtggggctggccgtgagtactcacctgccgccaccacggcagagaatgggggcggcaagaagaaacagaaggagnnnnnnnnnnnnnnnnnnnnnnnaagaaggaggtggcaatggatgaccacaagctgtccttggatgagctgggccgcaaataccaagtggacctgtccaagggcctcaccaaccagcgggctcaggacgttctggctcgagatgggcccaacgccctcacaccacctcccacaacccctgagtgggtcaagttctgccgtcagcttttcggggggttctcctgctgtggattggggctatcctctgcttcctggcctacggcaatccaggcttgccatggaggatgaaccatccaacgannnnnnnnnnnnnnnnnnnnnnnnnnnnnnnnnnnnnnnnggcagctgtggtcattgtcactggctgcttctcctactaccaggaggccaagagctccaagatcatggattccttcaagaacatggtacctcagcaagcccttgtgatccgggagggagagaagatgcagatcaacgcagaggaagtggtggtgggagacctggtggaggtgaagggtggagaccgcgtccctgctgaccnnnnnnnnnnnnnnnnnnnnnnnnnnnnnnnnnnnnnnnnnnnnnnnnnnnnnttttacatcgagtgaccccagacccgctcccccgagttcacccatgagaaccccctggagacccgcaatatctgtttcttctccaccaactgtgttgaaggcactgccaggggcattgtgattgccacaggagaccggacggtgatgggccgcatagctactctcgcctcaggcctggaggttgggcggacacccatagcaatggagattgaacacttcatccagctgatcacaggggtcgctgtattcctgggggtctccttcttcgtgctctccctcatcctgggctacagctggctggaggcagtcatcttcctcatcggcatcatagtggccaacgtgcctgaggggcttctggccactgtcactgtgtgcctgaccctgacagccaagcgcatggcacggaagaactgcctggtgaagaacctggaggcggtggagacgctgggctccacgtccaccatctgctcggacaagacgggcaccctcacccagaaccgcatgaccgtcgcccacatgtggttcgacaaccaaatccatgaggctgacaccaccgaagatcagtctggggccacttttgacaaacgatcccctacgtggacggccctgtctcgaattgctggtctctgcaaccgcgccgtcttcaaggcaggacaggagaacatctccgtgtctaagcgggacacagctggtgatgcctctgagtcagctctgctcaagtgcattgagctctcctgtggctcagtgaggaaaatgagagacagaaaccccaaggtggcagagattcctttcaactctaccaacaagtaccagctgtctatccacgagcgagaagacagcccccagagccacgtgctggtgatgaagggggccccagagcgcattctggaccggtgctccaccatcctggtgcagggcaaggagatcccgctcgacaaggagatgcaagatgcctttcaaaatgcctacatggagctggggggacttggggagcgtgtgctgggattctgtcaactgaatctgccatctggaaagtttcctcggggcttcaaattcgacacggatgagctgaactttcccacggagaagctttgctttgtggggctcatgtctatgattgaccctccccgggctgctgtgccagatgctgtgggcaagtgccgaagcgcaggcatcaaggtgatcatggtaaccggggatcaccctatcacagccaaggccattgccaaaggcgtgggcatcatatcagagggtaacgagactgtggaggacattgcagcccggctcaacattcccatgagtcaagtcaaccccagagaagccaaggcatgcgtggtgcacggctctgacctgaaggacatgacatcggagcagctcgatgagatcctcaagaaccacacagagatcgtctttgctcgaacgtctccccagcagaagctcatcattgtggagggatgtcagaggcagggagccattgtggccgtgacgggtgacggggtgaacgactcccctgcattgaagaaggctgacattggcattgccatgggcatctctggctctgacgtctctaagcaggcagccgacatgatcctgctggatgacaactttgcctccatcgtcacgggggtggaggagggccgcctgatctttgacaacttgaagaaatccatcgcctacaccctgaccagcaacatccccgagatcacccccttcctgctgttcatcattgccaacatccccctacctctgggcactgtgaccatcctttgcattgacctgggcacagatatggtccctgccatctccttggcctatgaggcagctgagagtgatatcatgaagcggcagccacgaaactcccagacggacaagctggtgaatgagaggctcatcagcatggcctacggacagatcgggatcatccaggtccctgggtgacttcttcacctacttagtaatcctggcagagaacggtttcctgccatcacggctactgggaatccgcctcgactgggatgaccggaccatgaatgatctggaggacagctatggacaggagtggacctatgagcagcggaaggtggtggagttcacgtgccacacggcattctttgccagcatcgtggtggtgcagtgggctgacctcatcatctgcaagacccgccgcaactcagtcttccagcagggcatgaagaacaagatcctgatttttgggctcctggaggagacggcgttggctgcctttctctcttactgcccaggcatgggtgtagccctccgcatgtacccgctcaaagtcacctggtggttctgcgccttcccctacagcctcctcatcttcatctatgatgaggtccgaaagctcatcctgcggcggtatcctggtggctgggtggagaaggagacatactactgaccccattggaagaagaaccaggcatggaaagatggggagctctggaggtgttgtggggatggtgatggagagggatggaaataacgggtggcattgggtggcaacatttggggagagataatgaggcaactcagcaggctaagttgcggggtatataaattggggtgatgaccccatagacctaactgtgaacaatcagattagacactatgtgttagagtccccccgaccagatccttttccatcccactccactatgttgtctattttttctgaggaattaagggttaccccaccctgcccactcccatcccttcaaccccacttcctactgtaatagatcagcatccaaaagcaggaacccatctaaaccagaaggaagccctctcagatcaccccagcctcactccatttcccacttccacccccgttagcttcctgcaggactctatccctggcttccccttcagaccttgcaatcacaaaaggttcttctggtgagtgcaagagcctgagactggaaaaggtggacttgtctcccagtcgaggctggtaagggaccttcagggagagctgggcagacaggtgggagatggaggtagggctggctggaggaaggaaacaacaaaggaagtgaggtagtgccaatgacaggacatttgacatgagtctccagatagatgtcgtggactccagctctacgtcccacattttagaataccccaccagcagaacaaactcagatctcatcagggtagcagcagaggcaggaccagaaggcaatcaagagcttccagaaatgccacacttgtgtgccacagagttccccgctgacccttggttaggggtcctcttagtccacaaggtccggatgtcactcatgtacttaataacacttcaccttctgtaatactaagtcctcagagctccatgctgttctgaaagggatggccacaagttctttcccagcctcttccattccctttcttttcatgcccatcccgatgaacctgcatcattccccgacactgccaagccaaccctggaaaaggagttcgctggccattggctagaatcagggtggagaagttccctgaaccttcctgtctcccagggacatgtatgcttccagggacaagcttaggtcatgaacatggtcagaacctttggacaagaggaaaaatactaagagatttgctttttctgggtgcggtggctcatgcctgtaatcccagcactttgggaggccgaggcaggtggatcatgaggtcaggagttcgaggcgagcctggccaacatggtgaaaccctgtctctactaaaagtacaaaaaattagccagtcatggtggcacacgcctgtaatctcagctactcaggaggctgaggcaggagaattgcttgaacctgtgaggaagaggttgcagtgagctgagatcgtgccattacactccagcctgggcgaaagggtgagactccatctcaaaaaaaaaaaaaatgatttgcttttgacgtcttaggtggcagggctgttccctccaggcaaatgcccttcaaaccgacgatcattgtgcccacttaccctgggctggagagttggtttcaggttcctacaggagatagctttctttcccttactccctatctaacacttttgctctgcaggcagccttgcccattctctaagcctggcttagaaggcactgggaatgtcctgtagagagagacctagataggtcatgcaagtgagaaagacatctgaggaaaatggaagacctaaggcagacaggaaggaagcacaaaagacaagcattgggtcagacccataaaccacctcccaaaggctgtcatttcattgcactggaattttgctttatcagaagcaaggaagtaagggagtcattgccttgggcctgggaatctaagtgggagacaatattaatttggatccgattaattggagattactaactgtggacaaaagtttatctttgcacaatcaataaaaatggcatttttttagtaaattaagagcataaacaatattgctagaggtggcatgtttagtctaccaaaaacaatacttttcaggcactttagaaatatccttttagaagcagcgagtgcatgggctaattatcatcaatctttatgtatttgttaaagaaacatctacaggatctttattggtgaccttttgtaagacattagtttgaggtactacctatgtacttgaaaataataaagtggcatttctttatgaaaaaaaaaaaaatatattaaataattaagatttataaaatttatacttgcctccctcctaaatcgtgatattgaaatatggtg

SEQ ID NO: 8253 - DNA, 1804 bp, Homo sapiens
caactgaacagcaggtgcgtcccagcggccgggcgggccgggtctccctcctgcgggcaggcgccgcgctgcggggcgcggctggcggagcggggcagccgggcgcagcgccccctgggcctgaagactggcgggcggcgggggcgcgcgcaggccggcgggggcgcgccgcgctgcgaggcctgcgcgccaggctgcgggagccatgcggcgatcgaggagctctgcggccgccaagctgcgcgggcagaagcggtccggggcctccgcggcccccgcggcctccgcggccgctgccttggcacccagcgccacccgcacacggcgctccgctagccaggccgggagcaagagccaggcggtggagaagccgccgtcggagaagccgcggctgaggcgctcgtcgccgcgggcccaggaggagggcccgggggagccgccgccgcctgagctggcgttgctcccgccaccgccgccgccgccgccgactcccgcgaccccgacgtcctcggcgtccaacctggacctgggcgagcagcgggagcgctgggagacgttccagaagcggcagaagcttacctccgagggtgccgccaagctcctgctagacacctttgaataccagggcctggtgaagcacacaggaggctgccactgtggagcagttcgttttgaagtttgggcctcagcagacttgcatatatttgactgcaattgcagcatttgcaagaagaagcagaatagacacttcattgttccagcttctcgcttcaagctcctgaagggagctgagcacataacgacttacacgttcaatactcacaaagcccagcataccttctgtaagagatgtggcgttcagagcttctatactccacgatcaaaccccggaggcttcggaattgccccccactgcctggatgagggcactgtgcggagtatggtcactgaggaattcaatggcagcgattgggagaaggccatgaaagagcacaagaccatcaagaacatgtctaaagagtgagcttctgcctctcctgccctgaaaaggaggaatgattggggccagcaactttgctctccctgccgtgcctcggtggtgctcctgaatgtggctgacctgggctgctggttccgtggactagggtcatcttgatctctgcagtttgctccagctaccagtttctttaggcagctctttgtcctccctctgcccagattttgatgtagtctaattgacatccttctcttcccaacttttgtgtgatcttttaggaaaaaaaataaatatttttaacattaaaacaaaaaaaaaaagaaaaacaaaaaaacaaaacaccagacaacacaaaacacaaaacgacaaacaacaaaacaacacacacacacacgcacacacagaacaacaaacacacgcgggaagggcgcgcgcgcgcaggcgacaagacaaaggacgcagtactaaaaaacaaccaaagtagaggggcgagggggggcacaaaaaaagagaagcaagaaagaaaaagcagacgccgcacaaagcgatgaccagaaaagaaaaaacagaaagagaaagaagaggaacagagaggggaaacaaaagaagaaaaaaaaaaaacacgccagcgaaaggaggaaagacagcacgagagtagagagagaaaaaagcacaaagaagagacagacaaacaaggagagaatacgaagagaaaaacaaaaacaaaaagggggaaaacaagagaaggagagcagacacgaaacaaaagacgcccccgccagagaggtagaacgcgaaggaggagag

SEQ ID NO: 8254 - DNA, 1306 bp, Homo sapiens; identical to SEQ ID NO: 7806
  misc_feature (38)..(38): n is a, c, g, or t
  misc_feature (75)..(75): n is a, c, g, or t

SEQ ID NO: 8255 - DNA, 5797 bp, Homo sapiens
  misc_feature (107)..(133): n is a, c, g, or t
gacccacgcgtccggtctttgatgttttctcagttcactgatatcaaaagaaaggactttggcattatgttcctgcaccaccttgtatctattttcttgattacctnnnnnnnnnnnnnnnnnnnnnnnnnnnagtaggaacgctggtcctttgtcttcatgattcagctgatgctcttctggaggctgccaaaatggcaaattatgccaagtttcagaaaatgtgtgatctcctgtttgttatgtttgccgtggtttttatcaccacacgactgggtatatttcctctctgggtgttaaataccacattatttgaaagctgggagatcgttggaccttacccttcctggtgggtttttaacctactgctattgctagtacaagggttgaactgcttctggtcttacttgattgtgaaaatagcttgcaaagctgtttcaagaggcaaggtgtccaaggatgatcgaagtgatattgagtctagctcagatgaggaggactcagaacctccgggaaagaatccccacactgcgacaaccaccaatgggaccagtggtaccaacgggtatctcctgactggctcctgctccatggatgattaattactcaaaactacaagtcccaagcaaagtgaactatttgttcctggaagtatttaataagttgcaaatgcagttcctttcataatatctcagcaccagaaacaaaaattaagattatcaaagcattttgaatagtgcactgccatgtgtcctgtctgtgaatgaagaagaattaccattctctctttgtaggcatgctgtatgtaattgacacaagggaacagtatttgcatttgtactgtcttagaatattatttatttttttgtatttgtaaatctgtggacaaaagagggtttcctcactccttttactcactgggctcatgacagtgaaggagatgctccatctgcttctccccctttctcttgctgtagtccaatgtgctatgagcatcagcttactttgtcacttagagcaagcaaaacccagtgcaagagtctcgttcagctctaaataggtttgctttcttttagttacagtgcccattttgaaattgcctatacagtcttagtgaccatttaaaccggacgaactaggtgtttaattttcactcttcatgttcaattagcagttcaaattaaagaagatggttattggagaacttttttgaatggttttgtattaaattgctttgaaatagatttcatttcttgtgcacacagccaagatttcttcaatgggtgtgagctagttgagggttaaccttgtaggttgcagagtgtatttgtttgtttgtttgtttttctctgtgatgaggtcagtgctctgattttgaaggaggatattcactgaagctcatagttataaacaaggaaatcactgttaagaatgggaatttgtcctgtgttctgggaataacataaagagagcaactgatttcagccaggttttgccactaccctataattagtgcagtcttatgttataaaagaaagaagttaactatatttggggacaaaaaaatatttcaagagttgataaagattacctgtgcagtgcagagcactttaatgcaaccagctttcaagaaaaagccctatctagtacttgatgttgatgtttttattttgctgagcaaaataaagccaatgggagaaggactattttaccctttgcttttctccttaaacgtaatccagatgactttcctgttactaaacactgagcagcattacactacaatgcttctttggtttccaggaatttttttcaaatggggctgtttctggaaaaatgaaaaattctattggacaatggcaatatcaacaatgaggaaaattactgaagaataagtttccataagtctcctacatagcagtgttatttatgtacagataagaaaaccatatgtcagccaaagattttatctcttcttctaacttttagtaagaggaaaaagggattataaaacccttcataaatcaagaaggccatcacttagaacgaaccccaaacaaaaatgccataatataaatgtgtgaatcagggctgtgaagacaacagcagaaatgctaacaagcgtgcagaaacaccagagagtgcgtatcctgctcagaaccattcacatttaattcaattcttggaaaaaattaaagctttttgcccacaatttgcaatctgtgggttaatagttaaaagaatgttcccaaccaaaaaattcttaccgtaatattatatcttgccctacttatttacaaaataatatgtttctgttatggtccttagtaataattgaagaggcttagaaatacatctgcttgtttattgagaaaacgatgcaaataattctgcttttagagccttgttattttatttcacaaaacaggcatatgtctaggagtgtaatttgtggatggttgagtttgtaagaacaatcataaaaggacttgttagtctccagaacatctgctaaaatgcaagtatatgtataaggtaatagcatattacagctgaaaattttgagaaggtaaaagtttcttaattaaaatatgaacatatttagcttgctttagtgtctggggcaagtcctctcaatggctaaaattaactttagagatccatgtgttcaggtttagatcatatgacactcgagcacagaagaataatttcaaggaggtcatcttgtaaattaaaggtttagaagaattgcataaaacgtagtaaatggggtctgtcattagcaaaggcaaatctaagcaatcatttttccccccagaagttacttagaaggagaactgggaacacttggggtctctctaactgatggcattcacttcacacagtcgtctatgttatccagagatttttatttcattttacattttagggcacagttctttggggctaattaaaatggggtttgcaggctttttatggtgaagaataatatatctctgtctatagctttcccatggtagcctgataaggctgagagagaaaaatatgtgcagtatctcatcctccccctgtaccaggccatagctttgaagtgtattttgtaaattcaactataggttagtcagaatgctgtttttcgttaattaacttagcctgtgttgatatctcctccttcctggtcacattcaaaccttcccagagtacaaaggggtatgtagaaaggattccagaagaagtaatactttattctctaatgttaatagcttttctggatctcttagtagggggaaagtagaaaatcgagtagaatttggcctcaggtcaataaatgatataaaaacatgtgttctatttatgtatatatatgtatgtttctccaaaaagtgataaaaccaaaatatcactgactcatccctacccatattcttttcataaaacccactcaccaggtacaatagaaacttccctccttgtttgtcagcctcctgttcatgttccccacacacctgaaggtggtagaatcttttcagcctcttagccagtgagctaaatatggctaagcacaggtcataagagcacctaaggccagcatataagccaactacagttcacctttccaaatttggtcctatggatgttgagcatagggaagcaactctcagtattttggattattcaagtgtatgtggtaaaaatgcagatgattgctgctttaccccagggtttattagcatcctacttctgctgggctgcatcattatataatgccacaggcatctagtcaaggtaaagaagccagaaaggttaggcaagaagtgagataaaatcagatcacctttgatcaaaatggttggtgaacctccacatgtccagttctgttgccaaactttccattcagagtatttggtggagtttgaatttgagcaaactaaatgccttcatcttaggtagaaagggcctgaatcttccattttatattcaaacctcattgttatttggcctaagtaaaaagtcagatttcatttccatttacctgagttcgctttaaagagcttttcaaagagagctttatagacacccacaattgtccccaatctcttcatgatgttgcattaatagttgtttttgtccctttcttggaaatgttaatgccaaagttgcctgaacattgggcggttttcttaatttgaagtataaaaattataaagagtaattccaaaggtattaaaagattgtttaacagtatgtgtggtgatgtcattatctccagagaggcttcaagaaatcctttggaaataaaaagttaaatgtttacatttcatgtggtatttcaggtcttcaggttctgattagcttacttttttcctttgtctttggctgatttctgctttgtagataaataataatagccctgagatgtttctaacatttaaataagaaaaaaatcaaatcgaagtcagcctgctggaaaagtgatcacatggcagttgcagtaacttgtatggaaagagaaaatgcaatgagcccagttactgcacttgccactaccatgctgtccatggaaggaataatcagcagttcagttgtcacaagccgcccttgaagaaaacgcagcaaaatattttaaaatgaagatattgcagtccccagagccagtgaaggtttcttttggtaaaatgaaattgtgccattgtcaaagtaccccgtagtgatgagcactgactggttcactggccacattttagttcttcataataataggccacaaaagggctctgtggtttgcctccatgtgcactggcccctccccacccctagggggcactcagtagctgctgagaaggcctgtccacgaggctgttggaacccctccaataaatacttagaggtagtgtatctgatgcttgttttcgtggagaaaattgtattggagaacttaaaacatcacgaatatttttaataggatccgcagacacccaaaggagaagcttggtcttttccaggtatttccaacttgagttcaacccaaagcctttgaaaggaatgcattaccacatgaccacttgtctgtatgaaccccagggggtctaacacgggacctaagaaagtctctgcagccagatagtacatggtgtctccacaaaactaggcattctggagattgcccagaaagggatgtgaggggaccgttaagatctgtcttgcttatctcatgcactcacattccttcagccccagagagtctcgtttaaaaggaagccagggtgttgacattttttagctattgatttcccaatagcttgtggatcagttgtacacccacacttccttctctgcctaattccgtttttctggaaaaagtagtatgcccatgtatgtgtgtttttcttaacacaggtccatgaaagtttggcttcctggtttgatgtctgttgcgtggcctggaaaccagggagcagcaactattgagatggtttctgtgttcagtgaaaaattctatttcattgagacaattttttctttatccacagtaattttttgacactgtcatcatgaaactacccttaggaaaataagattacctgcaaaaaaaaaaaaaaaaatagaaggggtggtggtgtttggatttgatttttttcaacttgcagtgagaaataggataggtgacaaaaccttacttgttttcttaagacaattcagtgcttgagcatctctgtgcagaaatggttatcagcagcgtcccaattagatttcatgtgtgtattgttattgtgtttgagcatgcgcaccatccgct

SEQ ID NO: 8256 - DNA, 4703 bp, Homo sapiens
tttttttttttaaaaagtaaaattaggtgctttaattcatctaaaattatatgcaagtcatacagaaaaaaaatttgagaagtaacattttaattcttggcaagtttttccaaaacgatgcatagtaatgatttccagaacagtttagaacaatggtttttgggtagtagtgcagtttacagaatggcatcatttataatccttttcttctactgaccagttacatgaatcacttaagaactaaccagatctgggtgcggtggcctactgcgattttttttaattgagaaggtactccttgttgaaatggggtattatagtgttatcccaatagcatttacatatttagaatcatttctaggaaaaacttagtaccaagaatgtcccttaacaagtcatgaaatcattcatcacttaccacttcagtatactagtttaaaatgaaattttaaccaagtttttatgtgtgcccaaagcatcatcttaacttttccagttttggattccattaaatcatgtctactttaaaggacaattagatgcaacagatttcattataaacctcttttaagtatgacagcttggctggactaagcacaatttctcctctttgaaaaactcctgcactgtcagaaagtattcagtaataaaggtaattatgcatgcttattctctcatatatatacatatatatatacacacactttttcgctttaagaaaactccttttttttttttttttttttttttttttttttttttttttttttttacatagttaagcagtttaaattttattgacctcccagtttttaaaaaaagttaaatttaaggtcacacctctaagtttgatgtactatatacagatcgtgcagaatatgagttaaacagatacaaattagtccatgcccaaaaagatatactagggtacagaatcatcttcataaatacatataaaattcttgtgtagaagcgaactgtccaggttttctgagacacttctaagtgaatcaaggcacaaaatgtacatacaccattgtgaatacacacattctagactttgtgcctctgacatagcccaaggatttagcttcatgactcttataaaactaaatgtactgaatgagattctgcttcttgggtgaaaaaccacaggaactataaacatcatgtagataattactccaaaatatggagaatacaaatacgagcactttattttaaaaagcaaacacaaaagactggtgtaaatccaagtgtttaaatgcctccgttttggataatttaattaagaaccgatacaagtttgttcccagaagctaatgcatcactagtctctactgaggaaaatgagttctaaaaattaacatggttttcagtaattcagatttcactatttatataaaaacctagagagaccaataatatccagtagcttcaaaagataagctaaagattctttgatgtaatcaactttaccaatgtttgtatgggtgtgtttaatatatacacaaggaaaatacactcactctataatttcttataaaatagcaagtaaggagtagaagtaggagatgtagaaggggaaagagaattcagaaagtccttctcttcagtaactttgacttcagaatcatcaaaaagcaaccacttcccctcatactcctttaagctttgcactacgtatgaaattttgttctcaaatccactaatattaatgcctgtttggtcactggattccttgtttctatcagattcatgggtcccagtagtatcactagtctcagaattacattttcggtcagtgtagttactagcaaccttatcaggattagaggctttgttgtatagctcataatctgctttgctcttttgtcctccaagaagtccaatagcttctacattttttttgttcaaaactttacttggctgtgtatttccaccaactctaattgacacttcttcatcattataattctcaaccacaccccttgcttcctcctcattcaatggttctggcttacctatttcacacatttggtcaaccacaaaatttcctttatctagttctaaactgttaaggtcagtgactttaacagaagcagtgtaatgcccactactaattgtaatgccactatgcatcacaaccgcaaataatccatagctgtcgttagttggctttgtgctccattcttctagtgacaatttaagaggtgtcaataaaggagtgttgatcttggaaagtccaccaccataacaatcaaactccaaaccactagcagcaaagcacttcaaatgaatagttataacttcaggcattttgtcaaacaaaagacttcgttcagcttcagtataatgatggcagttttcacagaaatatttatcttctcctacaatcctttctactgaagcaaattgtgaaattgcccatctcagggtcttcatttctgtttttggctctggagaaatttcagaactctcctctactttggaaagctcatcttcttgtactggcacactgatgtcttgaaaatcttctcttctttctgttaaactttcacattccaagcaacgcgtccttaataccagctgaccttgaaataatttctccactagctcaaaaccaatttgttcttcacctttgtttatgggtttaacttcattaacatttacaggtgtaacagtatttcctggagattcaagtccacaaccattagttgtgttatcactttcacacttccccaagtcctcttcaggatcacattcattttctttagattgtcctttgactccttggtttgttgttatttttcccagactacaaaatttagaaagaatgctgggttgcttagttgcagactttaaccaatttattttaactcttgatttcttttgtgagggtcttggactctcattttcagaaatatacttgggaattattttaggaggactctctaatgtatcacttgtagcttttctttttgatctagtttgtctctggttctcttccaatgactggtgttccttggataatttaacttttttcttcatgttaccaaattcagtgtcactttttcttttcccatttccttttgggagtttctctttaaagtcttcagaatgcctcatactgtccatctctatgctgttaataccattcatttcctctttcggatgaggtatttcttctaccttagtaggtaattctgccacattttttacttcttctttttttaggagttggcatgtttcttgaatgtttcccaaaatacattgtaatacttcctgtgcatcatgctgtagatatccttcatacatagggttgagttccctcagtgtgttaagcagtcgccttggctgagtggcaagttcatcagtatatttctctggatttaagagaaaactagcctggagctgttcaaccgaaatgattaaggactgtaaactgcatatcaattcataacttgccaaagaatcttctttgcaatttcccttgtctttttgattggcttcatcctttagagcttctttcttccttgaaataatattaaataagtgctttactccagatttaaaaccgggacaaaaatataatacctgaagtatactattaagatagcaagtattgccgagattattcagtcccacaaatggtaacaagttttctctcttctcacagtttataggtgaagactgtgctgcaggaacaacttgatcaatttcagatgctctatattcagaagctttttcttcattttcttgagaatctgtgaaatccaaagctctcttagtttcctttttctgaaaaaactttaaggaaagtctgtttttctttgaagggctacctcttgaaagtccattactttcactaggtatgacaccaggcatttttttcttcaaatcccaaggagtgtcaagagttaatttatagaggaaagttgtaatcaccaattatatctggtcatggcccaaagcgaagtccgcggcggtgacgccggcaagtccaacccgaatgagtgtgggtgcgacaggtgagtccctgccccgagcccgccgggtccccggccccaggaaaatctggtcggctcgccctccccgcgggggagtgaccatccgctcccaagagcgggaaccccgaccgccgctcgctcccgccttgcaccaacaccaactacatcccgggagcggcgcccatctgcgcccgccccgggagagccaggagcgcaacaagcagcggccccgctcgccgaacgcctgaaccgctagggtctttagcactccgccaccgaggggaacttggcgcgttttcctcagtctcaggacccccgtgttttagcctccgcccgcgccagcgctgcgattgaacgtggcgtcctttgaaattgccggttccagtctccacgctgcagagacacgaaaggcaggagccgtctcgcgacggccactcgcccctggcacgcacgggctccggagccagctgggactgtagttccccaaaagcctaacgggttccacagtttcaaacaacgcaggcacagagccgggcagctcgtgcgggtcctcgctgagggcgcgcgcgaggtgctagcggcctggctggcgggctcgagcctcacaccctttttttaaccattcgtgcgcgcgagttgagggaaaagcgtacgggtcgggagacgggacagagagcagacgggatgggccac

SEQ ID NO: 8257 - DNA, 3440 bp, Homo sapiens
agcgggccagcggacaccggagcgggcaggagcagcggccgcggcgccgcagggaccagcgggcccaggctcggtctggggttcttgcagctggcaccagccctcccggccccggccgcccacccgccgcggggaagatgccggaacagagtaacgattaccgcgtggtggtgttcggggcgggcggcgtgggcaagagctcgctggtgctgcgcttcgtgaagggcacgttccgcgacacctacatccccaccatcgaggacacctaccggcaggtgatcagctgcgacaagagcgtgtgcacgctgcagatcacagacaccaccggcagccaccagttcccggccatgcagcgcctgtccatctccaagggccacgccttcatcctggtgttctccgtcaccagcaagcagtcgctggaggagctggggcccatctacaagctcatcgtgcagatcaagggcagcgtggaggacatccccgtgatgctcgtgggcaacaagtgcgatgagacgcagcgggaggtggacacgcgcgaggcgcaggcggtggcccaggagtggaagtgcgctttcatggagacctcggccaagatgaactacaacgtcaaggagctcttccaggagctgctgacgctggagacgcgccggaacatgagcctcaacatcgacggcaagcgctccgggaagcagaagaggacagaccgcgtcaagggcaaatgcaccctcatgtgagcccggaacgcccgcctgcacgccgcccacccccactgacccccgctgcctcccccaacaccgacaccctcctcggcctcctcctcttctctcatccttcctccgacacctcggctggggaaaccgaggccaccgcccccccctccgctgcccctgcccaccccgaggcagggctggggcttttcttcctcccctgctctctctccaccctcctgttctgtctgtaccctccaaaaccaagagccggaggtggcccccttgtcctgcagatgggaaaacaggatggggagctggcaagaggagctgcttgttcccaccaggaccagaggaggctgcgtttccccgtttccatctctttccctggggtgtccccagccagacctgcgcgtcctgtccctcacatttgatcactgtgaccttctgggggaggggggagttgaaaatgcacatcggcctcagatatttttttcttttttctcctatttggtgttaacatacacccaagcccacccggcccgtcgtgacctctgatctgtgcccactcctccggttccagacgcacctctctcctctgtcttcacagtggggtgtggggcccgtgggatgggcctcaggccaccaggcaataaccacagggcctgcagcagtgcccctgccagccccgaatcccacccccgggaccagccacatccacagcacaactgccccgctggagaggcaccatgggcgtggaggggcttcccggacaccgcccacccgggacccgcctcttccaccaagacagagacgttagcaacgcatggcgggtggggacctggggtgctcaggagggggtacccggggccccggccagaggtacatcaattacacccccgtggggggacagccgatgggagccagcaccagcaggatccgagggcgccccggacagaggtctgccccacccacttcctccccaccacctgtgccccagagagcagggcctgcccgggaaggtggcgtcctggagtcgagtgtacctgcagccatgaggttctgggtgttttttgagagagtctgagtgacaccacactcgtgtgaccccacagggttgtgtccaacatacacggaagtggctatggaatggtgtatttgtgcaacctggggtgcgcggatgggtgacttgtatctaagtgcatctgcgtgtatacctgtgtgtgtctgtctgggatgatatgtttttgtggcagtctgtgtgtgtaatagtggtgtagggtatacagagaggtgggtagttgtagatacctgtgtgtggttgtcagcaagactggatatgtgtgaggtgtctgtgtgaatctttgtgcctgtatgagcatgactatattttggggagtgggtgatatggtttatctgagagcatttatctgtaaatatgtttgtcctgattgagggacacgatctgtgttccactctatagcaacatgactctagcaatgtgactttcggttccaaatctgtatcagtcagctactgctgtgtaacaaatgaccacaaatgtagcaaccagaaacaacacatgcttattatctcatagattctgtgggtcaagagcctgggtgcaggttggctgggtcctctacttgggatctcaggaggctgcaatcaaagcattcgccaggcagaggtctcatctgaaggcctgatcggggaaggatttgcttcttagaagctcatgtggttgttgcagcattcagttccttgctgttgcaagactgaaggcctcagttcctcgctggctgttggctggaagctgccctttgttctgtaccatgtgggtctctccacagcggggctcggagcatggcagctaagttagtgagggaaggtgagatggaggttttggtcttattgggtgtgaggaagcaacgtgtgtgtgtgcgcacgcccttttgtgcagtgagagagagagagagattgcacacatgtgtctctgtagtcatgtggccaggtgggactatgtaggtaacagattgctcgtgtctgatttggtacaagcatgtttgttttcctctgtgttcgtgtgagtgtttactcaacaaatgtttattggacacactcagagagagggagtgtgcacacgtgcgtgtgtgttgctatccagcacgtggaccgggctcccagaagagctggcattgtgtctgagcagagctgggtccccccaaaacttgggctggcccagggcccaccagcagctgatgttgcctcctctcctgtcctggcagtagcttctgggttctgaaggtgccggagagagtgaggctgggcaggggtctgcggccctttctcagggacacaccctgatagcacaatctccttggggccctgcccacctccaggcctctcccacctcaggccctgcccgaccctggggagagagggcatctgcaataggaggggacccgagcctgtcctggctgctggcccatcctgcctgggcatccctggtgctggggactgtgccaggccatgcttgctgtgactccgcccctgccccctctccccccgcatgtgggtgcccccactcccccatcgtggggtctgtgtagccttcgctctagacatagtcttcctgcaataaaaaagtggatcctgcattccccaccaaaaaaaaaaaaaaaaaaaaaaaaaaaaaaaaaaaaaaaaaaaaaaaaaaaaaaaaaaaaaaaa

SEQ ID NO: 8258 - DNA, 3193 bp, Homo sapiens
ggcacgagatgacaccaagcaaagcctacttagtttagatctccagaaattggctggtggaaaaaaatcaaacatgaagattgcagttttgttttgtttttttctgcttatcatttttcaaactgactttggaaaaaatgaagaaattcctaggaagcaaaggaggaagatctaccacagaaggttgaggaaaagttcaacctcacacaagcacagatcaaacagacagcttggaattcagcaaacaacagtttttacaccagtagcaagacttcctattgttaactttgattatagcatggaggaaaagtttgaatccttttcaagttttcctggagtagaatcaagttataatgtgttaccaggaaagaagggacactgtttggtaaagggcataaccatgtacaacaaagctgtgtggtcgcctgagccctgcactacctgcctctgctcagatggaagagttctttgtgatgaaaccatgtgccatccccagaggtgcccccaaacagttatacctgaaggggaatgctgcccggtctgctccgctactgtctcctattctctactcagtggtatagcattaaatgatagaaatgaattttctggtgattcttcagaacaaagagaacctaccaatttacttcataagcaactgccacctcctcaggtgggaatggaccgaatagtaagaaaagaagcacttcaatctgaggaggatgaagaagtgaaagaagaagatacagagcaaaagagagagacccctgaatctagaaatcaggggcaactttacagtgagggggacagcagaggaggagacagaaagcagaggcctggagaggagaggaggctggcacaccagcaacaacgccaaggaagggaggaggaggaggatgaggaggaggagggtgaggagggtgaggaggatgaggaggacgaggaggacccggtaagaggagatatgttccgaatgccctctcgatccccgcttcctgctcctcccagaggcacactgcgcctgccaagcgggtgctctctgtcctacaggaccatcagctgcatcaacgccatgcttacccagataccaccgctgacagcaccacagataacaagtctggagctcactggcaattccatcgcctccatcccagatgaagcatttaatggattaccaaatttggaaaggcttgatctgagtaaaaataatatcacttcttcaggcataggtccaaaagcattcaagcttctgaagaagttaatgcgtttgaatatggatggaaataatttgatacagattccttcacaattgccatctacattagaagaacttaaagtcaatgagaacaatcttcaggctatcgatgaagaaagtttatcagacttaaatcagttggtcaccttagaattggaaggaaacaatctcagtgaagccaatgtcaatcctttagctttcaaacctttgaagagcctagcctacttgcgtctgggaaaaaataaatttagaattataccgcagggtcttcctggttctattgaggaattatacctagaaaataaccaaattgaagaaataactgaaatttgtttcaatcataccagaaagatcaatgtcattgtactacgttataacaaaattgaagaaaataggattgctcctttagcctggataaatcaagaaaatctagaatccattgatctctcctacaacaagctctatcacgtcccgtcctatctacccaagtccttgctgcacctagtactccttgggaaccagattgaacggatccctggctatgtgtttggccacatggaaccaggcctggaatacttgtacctgtcatttaacaaacttgctgatgatggcatggaccgtgtctccttctatggggcatatcattctctgagagaattatttctggatcacaatgacttaaaatctataccacctgggatacaagaaatgaaagcactacattttctgaggctgaacaacaacaagatacggaacattcttccagaagaaatttgcaatgctgaagaggatgatgactcaaatctggaacatcttcatcttgaaaacaattatattaaaattagagaaataccatcttacacattttcatgcataagatcatactcaagtatcgttcttaaaccacaaaacatcaagtaattccaagttttcctttgctgtttataaactttactcatgtatttgtagtagctgcatttgtcattaataagagagacataatcctcctgttatactcagtatcattatatgctagtcaacctgattcactaacacacagatgaacaaccaaaatatacctaaaaggtatagtctctaggagttttattaatagtaaaggtaaaatctctcagtttcctacctctagaaagaggccatctcactagaataggatattatgcatactgagctagaccagaagagtctggaacaaaataaacacagcctttataatcaacttgaatactggtgttagctgagaactctgtaagtccctttaaaaattatgtatcttttggttcaagattaagaagcataatgacaacaaaaaaagcaggcagaatttatgaataagtgttgtttattattaaaacaataatttgttaatttcttataaggtcctgtgctataattactggtataaatataactgaatattggggtagctttcatttcttccattaattacatgtgtaaaattaaaacactactgtaatgttaatttcctggttttgaaaatcatattatggttatgtacattgttaacattaaggaaagctggcagaagggtgtgcataaattctatactctttttgaaacttttctataattctaaaattattttttaaagttaaacagtatattaagattaccttcactattcctcactcaagattaagacattttttgaaaagcagtagagtttgcttaaaatacaaattaattattcttgactataaccttgtaaaggtaaatctaatgtataaatttttgaaaaattttgcaccactggtcatagcatctatctcctttgccttaatttactgaaatacatcattttattcggttcaattgaaataaagctatgtctttactatgtattggccctaccaaaatcatatattaaaattttctaacataaagaaaaaaaaaaaaaaaaaa

SEQ ID NO: 8259 - DNA, 1523 bp, Homo sapiens
  misc_feature (962)..(985): n is a, c, g, or t
tttgtctcttcctcagaaacgagcaaacctgaaagctactctctcagcttcagagggaaaaaatggttgtagatttctggacttgggagcagacatttcaagaactaatccaagaggcaaaaccccgggccacatggacgctgaagttggatggcaaccttcagctagactgcctggctcaagggtggaagcaataccaacagagagcatttggctggttccggtgttcctcctgccagcgaagttgggcttccgccaagttgcagattctgtgccacacgtactgggagcactggacatcccagggtcaggtgcgtatgaggctctttggccaaaggtgccagaagtgctcctggtcccaatatgagatgcctgagttctcctcggatagcaccatgaggattctgagcaacctggtgcagcatatactgaagaaatactatggaaatggcatgaggaagtctccagaaatgccagtaatcctggaagtgtccctggaaggatcccatgacacagccaattgtgaggcatgcactttgggcatatgtggacagggcttaaaaagctacatgacaaagccgtccaaatccctactcccccacctaaagactgggaattcctcacctggaattggtgctgtgtacctcgcaaaccaagccaagaaccagtcagatgaggcaaaagaggctaaggggagtgggtatgagaaattagggcccagtcgagacccagatccactgaacatctgtgtctttattttgctgcttgtatttattgtagtcaaatgctttacatcagaatgatgaaaataggcttgccactttctcttattttaattccatggtagtcaatgaactggctgccactttaatataactgaaaattcattttgagaccaagcaggatcaagtttgtagaataaacactggtttcctagctatcctctgaaaacagtatgaaannnnnnnnnnnnnnnnnnnnnnnnagtaataaatattgtcgaattgctaaaaaaaaaaaaaaaaatcattcactaagtcactcagtgatatcaatatacttagctcagaaagtgtgggaggctgaataatggtgtctcccgacatatgcatgacttaatccccagaacctgtaaacatgttactttacatggtagaatggactttgcggatgtaattaaggaccttgaaatggttagattatttcatattgtccgggtggataagaaccaggattttgtaacagggaggcaacaagctcaaaatcagaaaaaagagatttgtcaatgggacaagaggttgaagtgctttgaagttggaggaagaggtcacaggcaaaaaagtacaggcagcctttagaaaaccgaaaggacaaaggtacagattcttccctggagtctgcagaaggaaccagccctgcctgcacatggctttagcccagtgacactgattttggacatctgaccttcagaactgcttgctcataaacttgtcttgttttaatgcaaaaaaaaaaaaaaaaaa

SEQ ID NO: 8260 - DNA, 5684 bp, Homo sapiens
  misc_feature (274)..(313): n is a, c, g, or t
  misc_feature (322)..(371): n is a, c, g, or t
aggctggctggctggaggttgacacaggagtgctcaggggagcagcatcacaagagggcagatcgaaagcatcgtccttgctgaaaaacagatggcagaggtggaagcggtacagctgaaggaggaaggaaaccggcatttccagctccaggactacaaggccgccacaaatagctacagccaggccctgaagctgaccaaggacaaggccctgctggccacgctttatcggaaccgggcagcctgtggcctgaaaacggagagctacgtccannnnnnnnnnnnnnnnnnnnnnnnnnnnnnnnnnnnnnnntcggacatnnnnnnnnnnnnnnnnnnnnnnnnnnnnnnnnnnnnnnnnnnnnnnnnnnaccaggccttcaaagacgtgcagcgttgtgccaccctcgagccacggaaccagaacttccaggagatgctgaggagactcaacaccagcattcaggagaagctccgagtgcagttctccacagactcgagggtacagaagatgtttgagatcctcttggatgaaaacagtgaggctgataagcgggaaaaggctgccaacaatctcattgtcctaggccgtgaggaagcaggggctgagaagatcttccagaacaatggagtagccttgctactgcagcttctggacactaagaagcctgagctggtgctggctgcagtgcggaccctgtcgggcatgtgcagcggccaccaagccagagccacagtgattctgcatgcagtgcggatagaccgaatctgtagcctcatggccgtggagaatgaggagatgtctctggctgtctgcaacctgctccaagccatcattgactccttgtctggggaggacaagcgggagcatcgagggaaggaggaggccctggttctagacaccaagaaggacctgaagcagatcaccagccacctgctggacatgctagtcagcaagaaggtgtctggccagggcagggatcaggcgctgaacctgctcaataagaatgttcccaggaaggaccttgccattcatgacaactcacgtaccatctatgtggtggataatggtctgaggaagatcctgaaggttgtggggcaggttccagatctgccatcctgcctgcccctgactgacaacacccgcatgctggcctctatcctcatcaacaagctctatgatgacctgcgctgtgacccggagcgcgatcacttccgcaagatctgtgaggaatatatcacgggcaagtttgacccccaggacatggacaagaacttgaatgccatccagacagtgtcagggatcctgcagggcccctttgacctgggcaaccagctgctgggactgaaaggtgtgatggagatgatggtggcactatgtggctcagagcgcgagacggaccagctggtggccgtggaggccctcatccatgcctccacgaagctcagccgcgccaccttcatcatcaccaatggagtgtcactgctcaaacagatctacaagaccaccaaaaatgagaagatcaagatccgcacactggtgggactctgtaagctcggctctgcaggtggcacagactacggtctcaggcagtttgcggaagggtcgacagaaaaactggccaaacagtgtcgcaagtggctgtgcaatatgtccatagacactcggacccgacgctgggcagtggagggcctggcctacctcacgctggacgctgatgtgaaggacgactttgtccaggacgtccctgccctgcaggccatgtttgagctggccaagaccagtgacaagaccatcctgtactcggtggccaccaccctggtgaactgcaccaacagctacgatgtcaaggaggtcatcccagagcttgtccagcttgccaagttctccaagcagcatgtgcccgaggaacaccccaaggacaagaaggactttgtagacatgcgggtgaagcggcttctgaaggcgggtgtcatctctgccctggcttgcatggtgaaagcagatagtgccatcctcactgaccagaccaaggagctgctggccagggtattcctggcactgtgtgacaacccaagggaccgaggcaccattgtggctcaaggtggtggcaaggccctgattcccctggctttggagggcacagatgtgggcaaggtgaaggcagcccacgctctagcaaagatcgctgctgtctccaatccggacattgcttttcctggggagcgggtgtatgaggtggtgcggccccttgtaagactcttggacacacagagggatgggcttcagaactatgaggctctcctaggcctcaccaacctgtctgggcggagtgacaaactccggcagaagatctttaaggagagggccttgccagacatcgagaactacatgtttgagaatcatgatcagctgcggcaggcggccaccgagtgcatgtgcaacatggtgctccacaaggaggtacaggaaaggttcttggctgacgggaatgaccggctgaagctggtggtgctgctctgcggggaggatgatgataaggtgcagaatgcggctgcaggggctctggccatgctgacagcagcacacaagaaactgtgcctcaagatgactcaagtgacaacccagtggttggggatcctccagcggctttgcctgcacgaccagctgtctgtccaacaccggggcctggtcattgcctacaacctactggcagccgatgctgagctggccaagaagctggtggagagtgagctgctggagatcctgactgtggtgggcaaacaggagccagatgagaagaaggcagaagtggttcagacagcccgagaatgtctcatcaagtgcatggattatggtttcattaaaccagtgtcttagacagcgaccctcagggatgctgggagtggtcctgtactgtgcagagtcctgggttggttgggttctcctggagagtcaggtcatctagggatcatagcagtgacaatgaagtctcaatataaaggaaagacttgattgttctctgagttgtgagtcttctcctttgtcctgacagagtttggatgtttcactctctctcttgcttcctgtctccttatatttgtcatgtttcagaaattcccagaataattttcacccatgattagaaataggttggatcattctttctgtacccattctgaaggccaggataataggttgaagttctttatattttggaaaatggattttgtggtaaggtaggaactaacgggtgtgtgcatataaaggttaatgctgttgtatttggatgctgatctgtgctgttttcatgacctctctcccacactatttgaatcagtctgttcagaactgtgtgtttcacctgcagtgctctgtcccagtcccatgcccattcccatcacttcactgtgatggaaatagagtttatgttcaacagtggggcatgacctctgcaatttgcttgggaaagtcttccaagcaagatggacatgatgaatacaaataagatctactcaaagtacttcaaacaaaaaataaataattcattggctcatgtatcttggccacccagggaaggtctgacattgttagttagatccagagtttcaaatgtcatcaccatggatgtgtctttttctctctctcatttcccctccccatatcttgtcttttatttattataggtttgtctcattccctggcaggctctctccctgtgataggaaagagagtccccagcagccccagggtgacatagttgttatagttcattatggaatagaagagagaagagcattctcaataacccggcaaagttcccagggatgactctgatatgtctatgtctcaggtcacatttccatctatgaaccaatcatattcagaggtggaatgctaattggccaggcctgggtcatatatacaagtctagggaagaaatgagcttcatccctgtccaattgacatggactgattaggggtattaatggaagaggtgtgccaccacaaaagaatgtaccctgggcagatcaaagaacatattctgtatgtcaggcttggccacaaaagaatgacacaagtaatatgctgtagatcagaacctctctgctaatattgcctttttagcatggttaagatagctaagatctagtactgtcactccagtatgtcccaattctacctacgtttattgaagggtcaacagttctgatctcagcattgggtaaagggtgggacattcagatttacggtccttgataaaaacaatttacaacgttccgttgtgtaataaatgtaagtgtacatatgcctgggacatcagctggaaaagggacagactatcagagagttgcactgttgcggtatgggccaaatccaacataatacccgctgtacctctagagaactaaaaccttaatttctcagatcttttctgcactaatggtctttacatacagcctacattttaactaactcttgcatgggcttgtttcacagcaggaaactatattcatcatatccttattatgatagagaatgacaacattcaaaagggtgtggtgcttctgaaaatatacacaataaatggcatgatttgacctctgtcaaattcttctttcctgctttcctcatatgtgggcttgagtgggtgtatttagctcctttaaaggaaactctttcacaggcagggccacactcttactcgttttgatctcatgaggttacatctgccagtggcgttcagggccagttagataaagttcatcttgtttggattggagagactttttttttttttttttttttgagacagggtcttgctctgtaacctaggctcaagtgcagtgcagtggtgcagtcatggctcaccgcagccttggtctcctgggctcaagtgatctttctacttcagcctcctcaatagctgggactacaggcacacaccaccacccccaggtaattaaaaaatttttttttgtagagacagggtctcactatgttgcccagtctgggagaccacattctttaacatgaatattttgtaaatagtccaagaagatctagaggaaagctgaattccttcatctgatttttgccactgggctgcctcccattgtctggctaagtcttcatgggaggcctttaagaaaagctgtgacaaatacctttgtttcccactgcctaggttacataagtagttggcttttccagcctagactcttatattgttgcttgtaagagggcccttctttgcagatttcttttttttttcatctatgctttcaaataggcagatgctagcctgagatcatctctttattgaggtagtttgcccaaaaacagcaaggaacagccaatacctgccaactttctaggtttttccaaccaattctcttacagaaaatctataaatatcttagaggtatgtttcttagtttcccaacatataatgggaaaattcatcatttatattattacttttaactgaagtatgttgttatcagagaacttggtctgtgtcatattaatcctttgccatttgagaagcatacagttttaaagtttatatctccaaaaggatattttgtaaaaatttaacccctttgactcttagtcttctcatttgtgaaaggtaaataataaagaatttctgttcctagtaagaaaaaaaaaaaaaaaa

SEQ ID NO: 8261 - DNA, 4062 bp, Homo sapiens
aactgtcggtaggtcaaggaggggggatccattgagcccaggagctcaagaccagcctgggcaacatggggaaaccactccccgaccctcgaggcaggcggatcacttgaggtcaggagttggagaccagcctgaccaacagggtacgtcagcctgtcatatgcatcaacaaccatgtattttgttcgatttgtattgatttgtggttgaagaataatagccagtgtccagcttgcagagtccccatcactcctgaaaatccttgcaaagaaattataggaggaacaagtgaaagtgaacctatgctaagccatacggtcaggaagcatcttcggaaaactagacttgaattactacacaaagaatatgaggacgaaatagattgtttacagaaagaagtagaagagcttaagagtaaaaatctcagcttggagtcacagatcaaaactattctggatcctttaaccttggtgcagggcaaccaaaatgaagacaaacatctagtcacagataatccaagtaaaattaacccagaaactgtagcagagtggaagaaaaaactcagaacagctaatgaaatctatgaaaaagtgaaagatgatgtggataagctaaaggaggcaaataaaaaattgaaattggaaaatggtggtctggtgagggagaatttacgactgaaggctgaagttgataacagatcacctcaaaaggacagaaatgatcttgtatctcttagagctatttggacaaggggaactggcatccttttctctctcatccagaatgtttggaaggtttgcagttgctgctcttcagtccaaagtagaacagtatgagcgtgaaaccaatcgcctcaagaaagccctggaacgaagtgataagtatatagaggaactagaatctcaagttgcacagctaaaaaattcaagtgaagagaaagaagctatgaattccatttgccagacagcactttctgcagatggcaaagggagcaaaggcagtgaggaggatgtggtgtcaaagaatcaaggcgatagtgccagaaagcagcctggctcatccacctccagttcttctcacctagcgaagccttccagcagcagactgtgtgacaccagttctgcaaggcaggaaagtaccagcaaagcagaccttaactgttctaagaacaaagacctatatcaagaacaggtagaagtaatgttagatgtgacagatacaagtatggatacttatttggaaagagaatgggggaataaaccaagtgactgtgtaccctacaaagatgaagaactttatgatcttccagctccttgtactcctttgtcccttagttgccttcagctcagtactccagaaaatagagagagctctgtggtccaagcaggaggttccaaaaagcactcaaaccatctcagaaaattggtgtttgatgatttttgtgattcttcaaatgtttctaataaagattcttcagaagatgatataagtagaagtgaaaatgaaaagaaatcagaatgtttttcttccccaaagacaggattttgggactgttgttccacaagctatgcccaaaacttagattttgaaagttcagaggggaacacgatagcaaattctgttggagaaatatcttcaaaattgagtgagaaatcaggcttatgtttatccaaaaggttgaattctattcgctcttttgaaatgaaccggacaagaacatccagtgaagcatcgatggatgctgcttaccttgacaaaatctctgagttggattcaatgatgtcagagtcagacaacagcaagagcccttgtaataacggttttaagtcactggatttggatgggttatcaaagtcatctcaaggcagtgaatttcttgaggaacctgataagttggaagaaaaaactgagctaaacctttccaaaggttctctaactaatgatcagttagaaaatggaagtgaatggaaacccacttctttttttctcctctctccatctgaccaagaaatgaatgaagatttttcactccattccagttcttgtccagtaactaatgaaatcaaacccccaagctgcttgtttcagacagagttttcccagggcattttgttaagcagttcacatcgactatttgaagatcaaagatttgggtcatctttgtttaagatgtcctcagagatgcacagtcttcataaccaccttcagtctccttggtctacttcctttgtgcctgaaaagaggaataaaaatgtgaatcaatcaacaaaaagaaaaatccagagcagcctttccagtgccagcccatcaaaagcaactaaaagttgactcattagaaaggtgtcatttgtggttttgtcctgagagaaatagaaaagttgttaaagttaccttttttcctcataaaagttctatacaaattggaattgataatctttagtcaagtatcaagtcaggatggtggattaacctgtacccagaatacttattgttcattttgaaaagactttgttcttttcatttttatttgggagtctttgtgaccagagaagttagggaggaggttatttttgtgttttggggttggttggttggttggttttgtttttggttttgtttttttactgaatttgatatgtatctcggttggatatacattgttttttaaaaatgttatttaactgttagatacagtggcctgttgataagccccacttgtcttcagaacttggatttcttaaataaaacttttagtgttgtctatacactgctcaataagacacttgagtttaagcttttcccagggtggaaattattttacctgtccctttttatttatgtttagtgatggcctagtttttctgcagggccatgatggagaaatagcactctagccttagtccaatattgatttactttctttttttaggttttatgtatatgtttgcattttttagcattgtgttttgtccagttttgtgaaaatgttctgctagtatgaaagaaaacattttctatatgaagacatttgttttatgttaggtagcttacattttctcctctgcgtgtgtgtgtatgtgtgtaaaatcagaaatttagcatactatggaaagaaggcatggagcacttgggtttagaggaacctaaaacatcatagcttcattgttccagatgtaacaggtttgaaagagctcatcgccaagttcttgatccacttgcattccaggggagttttcttttgagtagtatgtttcttgtttgcatgttcctgttctttgtggaaactatgcatggtagcatttttgcttgctgtgttttccatacttaagaaaaagaggtttcagttggctgatagaatatcttttatgtaggacaaaacttttctgtgaagagtgttgagggggtgaagataggtaagaggtaagcacaatttttaatttaggctctgaaaaagtgtattgttctaaacgtatttggtatgcctatataggtctttaaaaatgggtatgtatgctgtttaatgtgcactgaacattttacattaatattgtactgttttacattaatactgcatgcttttctatgtgaattgaataaagaatgtcataagcactgtgaaaaaagaaaaaaaaaaaacacaatacgaaacaaccaccaaggagcaccacccagcccacaaccacgcacaaccagcagcacctaccacacacaacacgcacgcgaacgccgccaaccaccaccgccccgacccggcggccaccacaaccgacccgcgaacaccactgcatcactaaccagcatgagcaagcacgcaacccaagaacaccgtgcaacgagcccagcgaacacgacagaaaacatcagaagagccagcgaacaacaaacaagcgcggctaccacgacaaccgagaaacaggccgccgacacaaagccaacctagcgggcgcagccagccagcagcgacacacctcatccgtcagcgcctgagcacccacgacaaaacacgacgctagccctcatacagaccacctaccgtagccagtagagaaaaaggaggggata

SEQ ID NO: 8262 - DNA, 2910 bp, Homo sapiens; identical to SEQ ID NO: 5779

SEQ ID NO: 8263 - DNA, 2233 bp, Homo sapiens
tccggcgccccgcgccgcctccgctgcgggtcgggagcgcgcgtctccgccgcacctcggatctaggagctactcgcccggccctgggcggtgggaggcggcggcggcggcggcgctcgcgcacctcggaggagccaggagccggaaccagggccgagcccgcgggccggggctagccagccggtcggagatgtccgcccagaggttaatttctaacagaacctcccagcaatcggcatctaattctgattacacctgggaatatgaatattatgagattggaccagtttcctttgaaggactgaaggctcataaatattccattgtgattggattttgggttggtcttgcagtcttcgtgatttttatgtttattgtgctgaccttgctgaccaagacaggagccccacaccaagacaatgcagagtcctcagagaagagattcagaatgaacagctttgtgtcagactttggaagacctctggagccagataaagtattttctcgccaaggcaacgaggagtccaggtctctctttcactgctacatcaatgaggtggaacgcttggacagagccaaagcttgtcaccagaccacagcccttgacagtgacgtccaactccaggaagccatcagaagcagtgggcagccagaggaggagctgaacaggctcatgaagtttgacatccccaactttgtgaacacagaccagaactactttggggaggatgatcttctgatttctgaaccacctattgttctggaaactaagccactttcccagacctcacacaaagacctggattgagaaacatgctctgtaaagggtcttcctgaagatgtggattctatctttatgtagcaagaaatctacatccaccaaaattgtgtgtgtttgggggagagagagacatagagatagagacagagaggcagagaagagacccctttagaagagagctgagctgattaagctgagtggttttttgttttgttttgtttttgctttttaatacatttggagctttgggagtattaaagtatttacaccaagcttgtccaacccgtggcatgtgtcccaggacagctttgaatgtggcccaatacaaattttaaactttattaaaacatgagttttgtttttttttttgctattttttttaaagctcgtcagctatcgttagtgttagtgtactttatgtgtggcccaagacaactcttcttccagtgtggcacagggaagctaaaagattggacacctctgatttatactagctcgttttgcttgttgaaaaatttggccaaatacctattgtcagcattcttgggtgaggattagcctaccatgttctaatctggccctgccactactatgctctacctttggtgagttgctttacctctctgggctgccccatttttaactgtaggttgacaggtctagagtgatccatcccacctctaatattttgtgaatttatgactttgccttcagatgaggctgagctatacataaaacagtataaactagggtactgcctcgtatctcttgtaggctctctcaaatctctgtaccttccacttaaccctaattgagccaagctttagtcaggggatctggttgtctaccagaatgtcaggagactcatcttacacagtcatggtggccaatgtttctggtgggttgtgctgaaacagctcttctgagaacttccaaccacccatgctctaacctggagacagccatcccctgcctcagaataagtaccaattcgtagtacatgtatggtactcttgtccccaagaaatgttaggaagcttgtcagctgaatgagaggaggtgccttctgggtatctctgtgttggtgtatctgtgccattggctacagaacaagaaaaatactatttgccatgctattaccttggcagatgtgtaggtgatagtcatctggctttgagctgagatggtcagtgggttgtaaattccccactagcagatattcagggtggcctgagttatgtaaacaagtgagcaacacagctttaatttcatggaggaatcaaagctgcacactggtattaaaacaacttgattttgcgcacacagttgcatgcatggcaagctgttaacctctgggtggcattttcattatgaatttgttcaccacctgtcttgcttaagctacaaaataaatgcatttgactgcaaaaaaaaaaaaaaaaaaaaaaaaaa

SEQ ID NO: 8264 - DNA, 4110 bp, Homo sapiens
  misc_feature (19)..(19): n is a, c, g, or t
  misc_feature (24)..(25): n is a, c, g, or t
  misc_feature (3553)..(3564): n is a, c, g, or t
aattatctttgcagacttnaacannaaagtcaaagaccataagtgtaaggttttatttctgaattcttgaatctatcccatttatctgtctgcaaggaacccacgcgtgggttccttgcagacttagagagaaggtgcaagagctgtctgaaaaggtcagagcaaagcatgaagctggtgagcagctgtgaccatagctggaagcttctctctgagctttctcctggttacctcctcctcccctacgtgaccagtcagccaagtgttaagtccaggggaacattttgctgcttccaagtactgtctcactagtgttatttgccataacttgcggccacagggcaaggtccaggtgctcagacctttacatcctggactttccaaggcctcccaaagctctctggcacccagggaacagtgtgcgtgtcgagagcttaatccgcaggagcatagccatggttctctggggtccagtgctgggagctctgctggtggtcattgctggatacctgtgcctgccagggatgctccgacaacgcaggccatgggagccccctctggacaagggtaccgtgccctggcttggccatgccatggctttccggaagaatatgtttgaatttctgaagcgcatgaggaccaagcatggggatgtgttcacagtgcagctagggggccagtacttcaccttcgtcatggaccccctctcctttggccccatcctcaaggacacacagagaaaactagactttgggcaatatgcaaaaaaactggtgctgaaggtatttggataccgttcagtgcaaggggaccatgagatgatacactcagccagcaccaagcatctgaggggggatggcttgaaggatcttaatgagaccatgctggacagcctgtcctttgtaatgctgacgtccaaaggctggagtctggatgccagttgctggcatgaggacagcctctttcgcttctgctattacatcttgttcacagctggctacctgagcttgttcggctacacgaaggacaaggagcaggacctgctacaggcaggagagttattcatggagttccgcaagtttgaccttcttttcccaaggtttgtctactccctgctgtggccccgggagtggctagaagtgggccgactccagcgtctctttcacaagatgctctccgtgagccacagccaggagaaggagggcatcagcaactggctgggcaacatgcttcagtttctgagggagcagggggtaccctcagctatgcaggacaagttcaacttcatgatgctctgggcctcccaggggaacacggggcctacctctttctgggccctcttgtacctcctgaagcacccagaagctattcgggctgtgagggaggaagctacccaggtcctgggtgaggccaggctggagaccaagcagtcctttgccttcaaactcggtgccctgcaacacaccccagttctagacagcgtggtggaggagacgctgcggctgagggctgcacccaccctcctcaggttggttcatgaagactataccctgaagatgtccagtgggcaggagtatctgttccgccatggagacatcctggccctctttccctacctctcagtgcacatggaccctgacatccaccctgagcccaccgtcttcaagtacgatcgcttcctcaaccctaatggcagccggaaagtggacttcttcaagacaggcaagaagatccaccactacaccatgccctggggttcgggcgtttccatctgccctgggaggttctttgcactcagtgaggtgaagctctttatcctgcttatggtcacacactttgacttagagttggtggaccctgacacaccactaccccatgttgacccgcagcgctggggttttggcaccatgcagcccagccacgatgtgcgcttccgctaccgcctgcatcctacagagtgagcttggccaagccagctgcaaacctggccagaggagttctattgcatctctcacctgttctcacccctctgcagccccaagaccccactggccacccctccctctggtccctgtggcaccccctacctctgttctgcctgtcctcgctctctccccgcctagtcatctgacaggcttatcattctctttaaaataccatctctcagagtgggttctgccgaaccctcctctcacaggaagtccagaggaagggggagtatctgtgggcaacttggtttgggagatgatgcctgccttgagaagtcctgagtacagagactggttccccccagacacgagtaacatggcatcttgcaaacatcagcctccactctcccagcttgctttagttttttcagcaacacttatcccacatcctatggaattcaggttctagaacagtgtcatccaacataaatatgaagcaagctacatgagtagtggggttttttggttttgtttgtttgttttgagacagagtcttgctctgtcgccgaggctgcagtgcagcggtgcgatctctgctcactgcaacctctgcctcctgggtttaagcaattctcctgcctcagcctccccagtagctgggattacaggcacctaccaccttgcccagctaatttagtttcctggtaaacacatttttaaaaagtaaaatgaaacaattcatttttataatatactttacttaatccaatatatccaaaatattggcatttcaacgtgatcactattaaaaattttaacgtaatagtttttaccttccctttttcatcctgtcttcaaagtctggtatgtactgtacttttgcagttcttcccagttcagactagccacattccaagtgcttaattgccgtgtgtggcaggtggctgccctattggatagaacaggtctagagaaatgataccttttttttttttttgagacagagtctcactctgttgcccaggctgcagtgcagtggtgtgatcttggctcactacaacctctgcctcccgggttcaagtaattctcctgcctcaggcttctgagtagctgggattataggtgcgcaccaccacacccggctagtttctgtatttttagtagagacggcgtttcaccattttggccggcctcctcggcctcccaaagttctgggattacaggcatgagccactgtgcccagtcaggatgtctttaatgtaggaatcattcaagatccctcctcagtgcccatgtctcccccacctcagggtgctgtcaaccctcccttggtttccatgatcattgctgaactcagagctttcttctatccccagacccacatgggagtctcccagcacctctgactcagcttggccaatgcagaacttggcatctgaacccctgcctcttccctgaaccactcctcctcctgatttccctgctctctctgctcagaacactaccattcaccccatctcccagagacactctccctcctcctctttcaccttcatacaagcaggcccccgtcctatcagtacacccccctgtgatgcctctgaaatatgtaccctcctcccctnnnnnnnnnnnnttcttatacctgtgatctctgcgtttctcttctacactgctgccagaggcctttttgccaaaagcactgctgattgtcactcttttactttcctggttcccctttgacttcacacacttgacgtttacattttgtcacagttggtcccccttgccttcacatacctgatgtttaaattttgtcacggttagtctccaaacttctcaactttgccagctttctccaatgaaaccatcagtagagacattgctgttcctgcccatcccagtgccagctactccttcctggaagccttcctggatttcacgcatcccatcctctggccagaaatggcctccgaactgtgcagctcctgcagcaccatttgtatcatagcatatctgttatgtgtcgttgctttctgtgtcttggtttctgcctgctgcccacttccctagactggagcctactggggcatggtattttattcatttctgacctccaattccctaagtggagattaaatgttagaaacctgaaaaaaaaaaaaaaaaaaaaaaaaaaaaa

SEQ ID NO: 8265 - DNA, 858 bp, Homo sapiens
gcagaaatgcctctcccatgggactaccctgaagccccatggaggcgtctccacagcagccctcctcgcccatgcccacgggcactgcagggtggcgggaggagggggcccaaccctgacccccggggatccaagggcttgaagcagacagtgggggccctgaaccccaacctacatctctggggcatctgcagctgtcagttcctgctccggtcaaaaggaagagactttgtccacagtgtgcaggagactcactcccagctgctgggctcctgggacccgtgggaagaaccggaagacgcagcccctgtggccccctccgtccctgcctctgggtaccctgagctgcccacacccaggagagaggtccagtctgaaagtgcccaggagccaggagccagggatgtggaggcgcagctgcggcggctgcaggaggagaggacgtgcaaggtgtgcctggaccgcgccgtgtccatcgtctttgtgccgtgcggccacctggtctgtgctgagtgtgcccccggcctgcagctgtgccccatctgcagagcccccgtccgcagccgcgtgcgcaccttcctgtcctaggccaggtgccatggccggccaggtgggctgcagagtgggctccctgcccctctctgcctgttctggactgtgttctgggcctgctgaggatggcagagctggtgtccatccagcactgaccagccctgattccccgaccaccgcccagggtggagaaggaggcccttgcttggcgtgggggatggcttaactgtacctgtttggatgcttctgaatagaaataaagtgggttttccctggaaaaaaaaaaaaaaaaaaaaaaaaaaaaaa

SEQ ID NO: 8266 - DNA, 1369 bp, Homo sapiens
  misc_feature (91)..(91): n is a, c, g, or t
catggcacagcttcaatagcctccgctgtagtgttggatgaccgaccatccccagaacagtagccatgatacgattatcgcaactataggnaatgccctcagccaagatcggcacaggccggcgcacgcttggacagcaccccgggccgaccggccggccgctgtggctgcaggcgagccctgcatttctgctgcctagacttcagcctggaggagctgcagggcgagccgggctggcggctgaaccgtaagcccattgagtccacgctggtggcctgcttcatgaccctggtcatcgtggtgtggagcgtgccgccctcatctggccggtgcccatcatcgccggcttcctgcccaacggcatggaacagcgccggaccaccgccagcaccaccgcagccacccccgccgcagtgcccgcagggaccaccgcagccgccgccgccgccgccgctgccgcgccgccgcggccgtcacttcgggggtggcgaccaagtgacccgctccgctcctccctgtgtccgtcctgtgtccgcgcgcgcgggtgcctttcccgccggggactcggccggtgtgcttcgtgctgtagttatcgttagttcctcttcccgagatggggccgccgagagaccccagcccctttgaaagagcaaggtttgtgctgcgcttccagttccgaaaagcagatgtttaagcccttggactgagggtgggatcgcagctccgaagacggagaggagggaaatggggccctttcccctctattgcatccccctgcccgactccttccccgcacccacgtgccctagattcatggcagaaaatgaccaaatcctgtgtatttgttttatatatttaataactgttttaaatgaaagttttagtaaaaaaaatacaaaacaaaaagattaaattgctattgctgtagtaagagaagctctttgtatctgaacatagttgtatttgaaatttgtggttttttaatttatttaaaattggggggagggcatgggaaggatttaacaccgatatattgttaccgctgaaaatgaactttatgaaccttttccaagttgatctagccagtgacgtggcctggtgggcgtttcttcttgtacttatgtggttttttggcttttaatacagacattttcctccaaaaaaaaaaaaagaataacagaaaactaacaaacaacaaagaactacgaacgaccacaccgacaacacgacaacaacacaagaacagcaaacgagagacgatgaacagaacagacagaggggggagggcgtgccccgtgacacaacatacgggcgtggggcgccctgcgtcgtgccccgccgcgttaggtgtatcctgagccgcgcgctt

SEQ ID NO: 8267 - DNA, 1324 bp, Homo sapiens
  misc_feature (401)..(511): n is a, c, g, or t
gtttttgagtccatcacccagttcagatcgagtcagaggccaaggaggagaacatgatgatggacctttttgaaactggctcctatttcttctacttggatggggaaaatgttactctgcagccattagaagtggcagaaggctctcctttgtatccagggagtgatggtaccttgtccccctgccaggaccaaatgcccccggaagcggggagcgacagcagcggagaggaacatgtcctggcgcccccgggcctgcagcctccacactgccccggccagtgtctgatctgggcttgcaagacctgcaagagaaaatctgcccccactgaccggcgaaaagccgccaccctgcgcgaaaggaggaggctaaagaaaatcaacgaggccttcgaggcactnnnnnnnnnnnnnnnnnnnnnnnnnnnnnnnnnnnnnnnnnnnnnnnnnnnnnnnnnnnnnnnnnnnnnnnnnnnnnnnnnnnnnnnnnnnnnnnnnnnnnnnnnnnnnnncgcagagaagatgcaggagctgggggtggaccccttcagctacagacccaaacaagaaaatcttgagggtgcggatttcctgcgcacctgcagctcccagtggccaagtgtttccgatcattccagggggctcgtgataacggctaaggaaggaggagcaagtattgattcgtcagcctcgagtagccttcgatgcctttcttccatcgtggacagtatttcctcggaggaacgcaaactcccctgcgtggaggaagtggtggagaagtaactgagcctgcgcttgagaccttctccacgcagcaggaagatcccaccgacccttcctggcctaatcctttagattaggtcacattacattaacatttaggaacccagaccgaaaagttgctgaaagggaaggagacacattcacaaagaaaagttgcgaaaattgcgaaatctgttgtgcacgctcaaatgaaaacgcctttcggctttgggcttttatttttttggaactgcgagtggcttaggtctagcctcattttgtttttgtttggttggttttatactatattaacttttattacggtgatccttttgtgccatgttcaaaagaagttcattcctgtctaaagtgggaaagttgcatttaatgttaggggtatttaatgtatttttgtaaatagtttagcactttctttttttacgtaaacctgaaatatattttaaatgtggaatgatgtatataaaatgtgcgaggatcctggtattgtaatattaaaaagaagtttctatatgaaaaaaaaaaaaaaaaaaaaaaaaaaaaaa

SEQ ID NO: 8268 - DNA, 4176 bp, Homo sapiens
  misc_feature (510)..(516): n is a, c, g, or t
cagggagcctggaatggcttagatggtccctttggcagaaaagcctctagagataggtcaggagggacccaggacctgagctctcagcgaggcaagggacagagaggaggaaagaggtccctcggggagcaggggtccctggaggctgagaatggtgaggtccagggtcctggggccctaaaggaggatgaagggcagggagtggaagaggctgggaggtcaggcaggaggcctggctcactcaggagcaggtctcaggcacagtcaggggctgaggttggaggaggaaagagaaggggagcagacgaggctggaagcatggggtggcagcctatgggagagaactgggggtgcctggaggagatgctgaatgaagatcagagccgggagccccctggtcaccttggtagcaggagaagtggcaaagacggcaggttggacatctatggagagaggagagatgctacccggagttccacatccagatacaagaaccaccagcacaagaannnnnnnaggatgcccaaggccccatgggccacttctcccagggcctggctgacatggaagtgcagccgggggaggctgccacactctcctgtaccctcaccagtgacctgggacccggcacctggtttaaggatggcgtcaagctcaccacccaggatggagtcatctttaagcaagacggtctcgtgcacagcctcttcatcacgcatgtgcaggggacccaagctgggaggtacacctttgtagctggtgaccagcagagcgaggccaccctgactgtccaggattcccctaccattgctccagatgtgacagagaaactgagagagccactggtggtcaaggctgggaagccggtgatagtgaagatccccttccagagccacctccccattcaggctgcctggaggaaggacggggctgaggtggtgggcagcagtgacagggaggcccaggtggacctgggggatggctacacgcggctgtgcctccccagcgcaggcaggaaggactgtggccagtacagcgtgacactgaggagtgagggaggctctgtgcaggccgagctcactctgcaagtcataggtaccagccctgtcttcccccaactaaggcctgagagtccctggggttctgggccctccctgccatcaagggcaggcctgggatatgatctctgctggctctgatcctcatttgcatgctgtttaagatccagacctaccactaactctgctcagactgcttaggaagaagcagttgagatgaacacagtgctgggctcctgctgggggggaggagccggttatgcttctctgaccccaatacactgggccctcaggaagttgctgggtaggatggtggtccccagccctgagtggtgccagcaagacaagcctgatcccccacaaggccccatggaggttcaggattgccatagggctggcgtctgcctccgctggcggcccccaagggacaatgggggccggactgtagagtgctacgtggtggagagacggcaggctggcaggagcacttggctgaaggtgggcgaggcccccgctgacagcaccaccttcacggatgcccatgtggagccaggcaggaagtataccttccgagtgcgggctgtgacctcagagggggctggcgaggccctggagtctgaggagatattggtggctcctgaggctctccccaaggccccttccgcgccagccatcctgtcggcctccagccagggcatcacactgacatggacagcacctcggggccccggcagcgcccacatcctgggctacctgatcgagaggcgtaagaaggggagcaacacctggacggcagtgaacgaccagccggtgcctgagaggaggtggacggtggcggacgtgcggcagggctgtcagtatgagttccgggtcacagctgtggctccctcaggtcccggagagcctggacctccatcggatgccgtctttgctcgggaccccatgagaccccctgggctggtgaggaatctccaagtcacagacagatcgaacaccagcatcactctgagctgggctgggccagacacccaggaaggggatgaagcccaggggtatgtggtggagctgtgcagctcagacagtctccagtggctcccgtgccatgtaggcaccgtgccagtcaccacctacacggccaaggggcttcggcctggagagggctacttcgtgcgggtgacagcagttaatgaaggaggccagagccagcccagtgccctggacacattagtgcaagccatgcctgttactgtctgtcccaagttcctcgtggactccagcaccaaggacttgctgacagtcaaggtcggggacacagttcgtgtgcccgtctcctttgaacatgcccgcaggcccctgggcccatccacctgcaggagaacgtgcctgggacggtgacggccgagtgggaaccctctcctgacgaggcccaggatgtcccgctgcactacgcggtgttcacacgctcctcagcgcacggtccctggcacgaggcagccgaccgcatctacaccaaccgcttcaccctcctgggcatcctccccggccacgaataccacttcagggtggtggccaagaatgagctgggggccagcaaaccctcggacaccagccagccctggtgcatcccccggcagcgcgacaggttcacagtgaaggctccgtgctaccgggagcccgacctgagccagaagccccggttcctggtgggcctgcggtcccacctgctgccccagggctgcgagtgctgcatgagctgtgccgtgcagggctcgccccggccccacgtcacctggttcaagaatgaccgcagcctggaaggaaaccccgcggtgtacagcactgacctgctgggcgtgtgctccctcaccatccccagcgtatccccgaaggacagcggggagtacaaggctgtggctgagaacacgctgggccaggcagtcagcactgccaccctcattgtcatagaacccagcacctagcctcacctcaccctgggatggtcctggacccttgaagcttcacttccgacacctgcactggcccgggaagccaatcccaaggatggaggctgtgcccagagccccaggaaaatgggagtgagaagatgcctggcgaggttttggccaggaggacgtgaagtccttggggaagaaaaacaagggaggagggcattccacctcctggctccaagctaagtcactcaacagaatgacagcgaacctcctggacccttaccatatgggtttctttcttcttcgcttcaggagatccagagggcacctgcctgcaggatgggccggctccttattttcctgggctgagccgtttggagggagggtgggcacagctgggcctgctgtgaccactgggagggaagaggagaggaggtcagaggacctgggtgaggactagggcatcaaggtcgtgtgtgtgggtgggggcagcctccacctcctggattcaagagattccaggggtgcagcaagtgctttctatgcgtttcttcattaaaacattaggctaatacaggcaaaaaaaaaaaaaaaaaaaaaaaaagaaaagaaataaaaaaaaaaaaaacaaacaagaacaaaagaagagagggggggccgcgcgccgacgaaagattactgccctggcggaggagccccacgacagatgacggcgagccaccgcacgcttgtgtgtgtagtaacaagagcgggggcgcccacatagaggagagcgagcgcccttattaaaaaagaacgcacggcgacgcgcggcgcccgcgcagtgattaaaacaaacgcccgacgaggccgagtgggagcgaaaaaaaaccgcgctgctgcaatgctgagtggggagagatacacatctatttggtggttgaagaggggagcgaacccccatataactatctgtgtgtggggggggggtgtgagacaaaaataaatttagggggcgacagacagaaatattgtatctcacggaccgggaggaatatttagatgacaggctgctctgtaggaagggaggggagagatcattgctataacgaggagtattcttacagcggggcggctatattatacagtggggggtgaaaaacgaaagatgcgacgcaagatatctt

SEQ ID NO: 8269 - DNA, 455 bp, Homo sapiens
ttttttttttttttgtagtttgacattttaatttcatttcagttcacatacacatgaattcaatctcatacaaaatttaaacatagataaagaattccaatacagatcaagacaaatgtccgccttcaggaagaggctggcaaaaacacatacaatttgctctcaatcaagtgtacagtgttcaatgagtagagagtttcagttttccaagatgaaaaagttccagagacccgcctggcatttcaccactgatgtgtttaaaagcttcctactgtctcgataagaaagctcctaaggactgttgttctgtgacagtgggtttcctgggctgagatccggggcggggcaaatgcagcagttcccaccttctcttaaaggctgcaatgccctgatggagagttctggttgccccaaggccttttgccagccgctggcccacagctctgtcagccttt

SEQ ID NO: 8270 - DNA, 2029 bp, Homo sapiens
  misc_feature (51)..(114): n is a, c, g, or t
ttttttttttttttttttaacaatagtccttacactgaattcatttatccnnnnnnnnnnnnnnnnnnnnnnnnnnnnnnnnnnnnnnnnnnnnnnnnnnnnnnnnnnnnnnnnctatggtacataccaagcaattcaactttttcttgtaatgtcagacttttctcttcttcttgggagcacttccagtatcactagtgctagtggcatcactttatacgagtcttatggtattattcaaagtttacagtattgcattaaacacgatgaaaaatacatgagaaccacaagagattaccttttactgtggtaggcaatttactacagagacaaactgctgaaacagaggtgatcagtgccgattaaaatgtgtggcattttaagtggatacttgcagcacctgaactcactgcaatagcaataggaggtggctatgaaattattagagaagtatagtatataccacagtaactttttgccactctcacttaatactgcatctttacatttgtttcctcgtgccgaattcggcacgaggatcacaggaagcatgggaccgcaaggcgccctgggaccacctggtgtccctggagcaaagggggaacgaggagagcggggtgacctgcagtctcaagccatggtgagatcagtggcgcgtcaagtatgcgaacagctcatccagagtcacatggccaggtacactgccatcctcaaccagattcccagccactcctcatccatccggactgtccaagggcctcctggggagcctgggaggccaggctcacctggagcccctggtgaacaaggacccccaggcacaccaggcttccccggaaatgcaggcgtgccagggaccccaggagaacgaggtctaactggtatcaaaggagaaaaaggaaatccaggcgttggaacccaaggtccaagaggcccccctggaccagcaggaccttcaggggagagtcggcctggcagccctgggccccctggctctcctggaccaagaggcccaccaggtcatctgggggttcctggaccccaaggtccttctggccagcctggatattgtgacccctcatcatgttctgcctatggtgtgagagctccccatccagatcagccagagttcacccctgtccaagatgagctggaagccatggaactgtggggccctggagtctgatagcctcaggagaaatttgaagaccaactgcaagaactcttaaggaatcttgtttgagaaaatgttgttatgtggtttgtatgctacttttggggggcagggctcatttcagcagcctaaatctcctccttggataatgttaatattattattattattaacaaaaaatatatatttttaaaaagttcccttaatctatgacatggtagcaatgatttccctttggtgtcttaatggcatgtcagataatttgtttttccagagaagagagctcaaagaggaattgggaaaaataaattgaactctggaatcttctctctcaagtcctaaaatgaacaaacagatatgattgtgtttgagggaaatatgtccctagcaggaaaagaattcaaagaggttcaaagaatatgtcacttactcctacttgctataggaataaccttgctgataagaaaaaaagggacaatattggagaaactacctcttgtttaattgatctgtccaactctgagatcacttggtaactggtttcatgtgtatccaaaaatcagcatttggatttaagctttctgaatttggtagtttaagaaacagatttagtttttcagtggttttaactcatgtgaaataatgattttccaccagctctgatgcaaagagatataattttaatgaacgatttatccagcagtttgttccaggggttgcctctccttatctacggggattactttgtacatgcagataagttttcgcaaacctatttccattttcttttgtaagcaaataaaactttaaaacaaaaaaaaaaaaaaaaaaaaaaaaaaaaaaagggcggccgct

SEQ ID NO: 8271 - DNA, 1037 bp, Homo sapiens
ttttttttttttttttttttttttttttttgctgtgaaagccgtaacatttattgaagagcggacatatgtttgcaaatcacagtgtgcatgggcatgcattacatggttcataatgctattccaattaggcttttcatagtgccttctcataacgtcctttaaaaaaaataataactgaaagggaaaagaaagtgtcaattgcaattacatttacaaaaccaaactgctgctttcaattagagtgaatctgtgcttcgctactcagatatacacatgtagattttccaaggcccatgcacacacttctgtaggggcagaaattttctatgaataatggctttagcaacccgaatagtatctctaaacattgacaagcttggggaacagggcaacaagtgcaatgaacaatacaatttctaacgtttgtcccagtcaacataccactttgccctggagatatttaacacagcatttcatttttggaatgataagggataattcatctaattaagggtattatacagaatatacctataaaagacatttcccatcttaaataatatttagaaagtagatttattgtagatttatttccttttggtccagtagaagaaattttggcaaaattgttaagaaaaaaatactacttagctcttaacatggaatttagcctcttgttttcctctgaaaaggtatctctcaactgcagtaataaaaaataacacttaatttccaggagtttaaacaattttaaaaaattatctatttcataagtagaaaagttatgttcttcaaatttttctttttttcttttcttttttttttttttttagacagagtctcactctgttgcccaggctggagcgcactggcgcgatctcagctcactgcgacctccacctcctgggttcaagccattctcctgccttagtagctgggattacaggcgcacaccaccacactcagccaattttttttgtatttttagtagacacagggtttcaccatgttggccaggcatgggggcacatgccc

SEQ ID NO: 8272 - DNA, 1024 bp, Homo sapiens
agagaactggcgtatttggaatgcttcttacactaacactgtctcattgtaaaatataaaaccccttactctaactacatttttattcctctggtagtgtggtatccaggcaacatatcacttctgctatgtaattctaagaattctcatttctagagtacctgagccaaacaaatacacaacggaagctgcagctgtatcatcactagcaatttgctcatcattatttactacctttgaacctaaggtttcctgcctatgcttttgaaagcaaaaatcagtctcctttgcatgaaaaagagccttagatttttaaacatgttagttaccagaatgctaaaataccagttgattacccaaattattttggaaatctatccataatggaagtctacaacaaacacataaaacagattacactaagagctgagaaattcaaaggaactgaagattctgagagataaactgttcaagtcttagcaatgatactgcacttctctttgacaggttctgggcttaagttagaggccctactggttccaaaccatattccactgactttgcaagtaaaataaatttgattctgaaataggaaacaaaaaaaggagaaataaccgaatagtagaagaaaaactgtttgtaggaagacgatgcagatggaatgatgtggacattgagtaaccatgtcaataaaatatataaaccaaacttaaatttgtgaaataaggaagttggtacctttgttgttacagtgtataaaaacaatttcggaactgctgttgcaaaaagacatatatagttttgcttccttctggtgttaagctgtttatatttcagtttcagttttaacttctaagttgccttgtaattgggactgtgtttcagcatcacaaaaaccaaatatttattatggatgcatctgtatcagcaattaaaaaataaacaagtaaaagtgaaaaaaaaaaaaaaaaaaaaaaaaaaaaaaaaaaaaaaaaaaaaaaaaaaaaaaacaaaacaaacaaag

SEQ ID NO: 8273 - DNA, 1559 bp, Homo sapiens
ggcggaagggtgcggcgaggcggaatggcggcggctgcggactcgttctcaggcggccccgcgggggtgcggcttccgaggtcgccgccactcaaggtgctggcggagcagctgcggcgcgacgcggagggcggcccgggcgcgtggcggctgtcacgggcggcggcgggccgcgggccgctggacctggcggccgtgtggatgcagggcagggtagtgatggcggaccgcggcgaggctcggctgagggacccgagcggggacttctcggtccgcggcctggagcgggtgccgcgcgggcggccctgtctagtcccaggaaagtatgtgatggtgatgggagtggttcaggcctgcagccctgagccctgcctgcaggctgtgaagatgacagacctttctgataatcccatccatgaaagtatgtgggaactggaggtagaagatttacacaggaatattccttagagtatgttggaactgtcgttaaaaacaaccaaaatcccgaaactatttagaagcttataatgatgtggatttcatggacacttttcaatgcgtatttttcaaatgcttctcagagagccttgctttggttgaccaaggagtccggatgtaggaatgtttaaatcctcggatacttcagtgacacagcctctgctgccccttgctttgcctgtgtttgctgatgaaaagcagatgcttgtgtttcattttccttcctggtttgtgtgtgttaattctctctctctctctcagacacagaagtctcatgttgcattttccaaattttatgagtgatgatactttttccattactgctgcgtccctgttttacaatgcaaaatttaagtacggtcattgcccatggtgattaaagtgtggttatgggcaggaagacagactgtgtaaaaaaggaatgacatcctggctcctcatcttcttcatcagcaactaccataaccagtttgcgagtcaaatggcatttcctaacggcaggcatggcggcccctgaaagacaacagctccctttctgcttcggacaccactcaaacatttagacgcagctctatcccttttcctagctagagaaggtgatgccttcttccattactcagagatgttgagacgttttcagaatttcttgttgaaatgaaaaacatcaagataaaggacgcctttcaggcattagctaaacttccacttcataactttcggcgagacgtggtgagcctcctggtgtagagttcttttgtctttgtatggaatgactttttgctgtgatggttttgaatgttgggtttctgctgtctgcttagtacccatgcctgaattttttgagattgtaaatatcaaaggagttagattgtgttctgacatggttgtagactttcacctggattattgatattctacctctaataaatttttaataggcaaaaaaaaaaaaaaaaaaaaaaaaaaaaaaaaaaaaaaaaaaaaaaaaaaaaaaaaaaaaaaaaaaaaaaaaaaaaaaaaaaaagagagaaaaaaagagggggaaacacggggaaaagtgt

SEQ ID NO: 8274 - DNA, 3299 bp, Homo sapiens
  misc_feature (3177)..(3197): n is a, c, g, or t
  misc_feature (3296)..(3296): n is a, c, g, or t
gggagcgcggagcggaggccgaggcgagagcctggcgctgtaggactagaacgaaaggagtgaggcgccgagagcccagataccattttggcgtgagagctggtggttggcaaggccgcgggagtgggaagcgtccgccatgttctgcgaaaaagccatggaactgatccgcgagctgcatcgcgcgcccgaagggcaactgcctgccttcaacgaggatggactcagacaagttctggaggagatgaaagctttgtatgaacaaaaccagtctgatgtgaatgaagcaaagtcaggtggacgaagtgatttgataccaactatcaaatttcgacactgttctctgttaagaaatcgacgctgcactgtagcatacctgtatgaccgcttgcttcggatcagagcactcagatgggaatatggtagcgtcttgccaaatgcattacgatttcacatggctgctgaagaaatggagtggtttaataattataaaagatctcttgctacttatatgaggtcactgggaggagatgaaggtttggacattacacaggatatgaaaccaccaaaaagcctatatattgaagtccggtgtctaaaagactatggagaatttgaagttgatgatggcacttcagtcctattaaaaaaaaatagccagcactttttacctcgatggaaatgtgagcagctgatcagacaaggagtcctggagcacatcctgtcatgaccatgcgccgaggcacttccaggcttcactcaactcatggactcctctgtactcactctctccaccctcccttcacctccctctttgattttagaagctatagacattgtttaagataactaagaatacttggctaagaagtataatttgctaactattaaggactttctttttttaatgttgtacactattcttcctactcttttttggttttggttttgttttgtagagactgtctcactatgttgcccaagctggtctcaaactcctggcctcaagcagtcctcccaccttagcttctcaaagtgttgagatcacaggcgtgagccactgcacccgacccctactcctttttctaataagctgtatctgtaatcacagcattcctacagttgttacagtgtgttttttaaatgaaagtaaacatggttacatttgaatctcttaaataatcagtcacttggctggacaggaagaaggtagatcctgtgtgtcttgttttctggtcatgtgtattgtacaagctagagagctgaatttctgagatacacattttcaaatcacatgcaagtgaagatgatggtctgtagaaattttcagtatatataatgtttaatgacatactaatttatcatctggctatttgggaaggaaggacacacatggattttgcacatttccaccatggtggctggtgtggcttgtggctatggggtgatcaccagtatcaccactttggaaggggacagtgaaattggggctagagaaggaactttgtacagttttccctgagattcagattgactgaaaagtcacatgaagagttgattgtcttttaatggtatgttttaaacagctgacattttaaattttgatgaaatccagtttattcgtttgttcttttatgctttgggtgttgcatccgagaaatcttttcccatcccaagatcacaattttttttcctttttacttctagaagtgttataattttaagctttatactttggtctatgacccgtttttttttttgttttgttttgttttttcgtttgtttctttgttttgagatggagtcttgttctgtcacccaggctggggtgcagtggcgtgatcttggctcactgcaatctctatcccctgggttcaagtgattctcttgtctcagcctcccaagtagctgggattacaggcacaggccgccacgcccggctaatttttgtatttttagtagagacagagttttaccatgttggccaggctggtttcaaactcctgacctcaagtgacccaccttggcctcccaaagttttgggattacaagtgtgggccaccgcggccagcctatgatccattttgaatgaattttttatatggtgcaaggtgtcaatccaccttcactttttcttgggaatatagatatccagctgtttcactaccattttttgaaaggactgccctttgctctatcacctttgcatttttgttaaaaagtagttgtcaatgtatatgtgggtttatttcaggactctgttttgttccattgacctgtttttctctcctgaatgccaataccatatttgtatgtagtgtatgtaattttctaataattcttgaaacagatagtattaatgcgtcatatttttgctgttgtttgtattttttgtggagatggggtttcaccatgttggccaggctgtgttgaactcctgagctaaagcaatacacttgcctcgtcctccccatgtgctgggattacaggcgtgagccttggtgctggcccagtgtaccacatttctttttgagatttgttttggctatgttaagtcctttgcttttgatgtgaaatttgggaacaggcagggtgtggtggcttatgcctgtaatcctagaactttgggaggcctagatgggtggatcacttgagctcaggagttccagaccagcccgggcctatggcgaaactccgtctctacaaaaaatagaaaaaattagccaggtgtggtggtgcatgcctgtagtcacagttacacggcaggctgaggtgggaggatcacttgaaccccagaggtcaagactgcagtgagctgagatcacaccactgtactccagcctgggtgacaaagtgagactctatctcaaaaagaaattaggatcaacttgtcaatttctacaacaacaacaacaaaaacccctgttgggcaccttgattgagattgcattgaatttatataaaactgttgggagaattgacatcttaataatattgagtcttctggcctataaacaaggtctgtcttcctaggtattaatgttttgtcttctatttctcttaataatcttttgtagttttcagtgtacaggtctaccatgtcagcatttcatagttttgatgctaaatggtattttaaaatttcaaattctaaccacttgttgctagtaaatagannnnnnnnnnnnnnnnnnnnngtatccttcagccttgctaaactgtgagttctcatggtgtttttgtaaattacatcaacagtcatgtgttctatgaataaagagttttactccttccantca

SEQ ID NO: 8275 - DNA, 5274 bp, Homo sapiens
  misc_feature (1823)..(1847): n is a, c, g, or t
  misc_feature (2820)..(2861): n is a, c, g, or t
  misc_feature (2874)..(2891): n is a, c, g, or t
  misc_feature (2926)..(2947): n is a, c, g, or t
  misc_feature (3075)..(3105): n is a, c, g, or t
  misc_feature (3485)..(3520): n is a, c, g, or t
  misc_feature (3757)..(3759): n is a, c, g, or t
  misc_feature (3775)..(3775): n is a, c, g, or t
  misc_feature (4516)..(4537): n is a, c, g, or t
ggcgcacgcaggcacatccgaccctgtcgcctcttctctcctggtgctgcccagaaagccagccctcccttcccttcttggggcgcagaggctcagccagctcagagcgcagcctggagccgacccagaagggcgaagaaagcccagcggacgagcctcctttctctgctgcctgcccgggctggggcgtcccatcccccgccctgaactccgatctctcccaccccacccctctctgggtttcacccggacagagccgggagctgggtgtcgcccccgtttggaatccacgtttcagcactttggacagcgccccggacgccccggcccctttgggttggcgatggcgagcgttcagcaaggcgagaagcagctttttgagaagttctggcgaggaaccttcaaagcggtggccaccccccgtcccgagagcatcattgtcgccagtatcacggcccgcaagccgctgccaaggacagagccccagaataaccccgttgtcccagctcaggatggaccctcagaaaagctgggtcagcatctggccaccgagcccttgggcaccaacagttgggagagagacaagacctgtcgggaactgggtgccaccagaggacacagtgcctctcatgacaaagacttgacaccaccaccttcctccaggggaaagaagaaaaagaagaaatccactcggaagaagagaaggaggtcctcatcctatagcccatcgcctgtcaagaaaaagaagaagaaaagttccaagaaacacaagcgacgcaggtcattctccaagaagagaaggcacagctcctctagcccaaaaagcaaaagaagagatgagaagaggcacaagaaacaatctcgaagccggccccgaaagtctcaccgccaccgccatcaccgctgcccctcgcggtcccagagctcggagtcccgcccctcaagctgtgagagcaggcaccgcggccggtcccctgaggaagggcagaagtcccgccgaaggcactcccgccgctgctccaagaccctctgcaaggacagccctgaggcccagtccagtcgcccgcccagtcaacccctccagatgcttggctacctgtcagccaggggtgtaatcactgggtcggggtctgctgctgacctctttaccaaaacagccagcccgctcaccacctcgcgaggacgttcccaggagtacgactcaggaaatgacacgtcctcgccaccctccacgcaaaccagctcagccaggtctcggggccaggagaaggggagccccagtgggggcttgagcaagagccgggagctcaacagtggcaacacctctgattcagggaactccttcaccacctcctcaccccagaacaagggggccatgttggagaatctctcccccaccagcaggggcagagagtcaaggggatttcagtcaccgtgtctggaatgtgccgaagtgaagaagtccagtttggtcccatccacagcccggagctcacccatgaaagggtgttcccgcagctcctcctatgccagcacccgatcctccagtcactcgtcccgatccccaaatcccagggcttcccccaggtacacccaaagccgatccacctcttctgaaaaaaggtcctactcccgctctcccagctattcctccaagtctggcaagaggagcccgcccagcagaagctctaggtcccgccgcagccctagctactcccgctacagccccagcagggagcgggatcccaaatacagtgagaaggactcgcagcagcgggagcgcgagcgagcgcgtcggagacgtcggtcctactcgcctatgnnnnnnnnnnnnnnnnnnnnnnnnngccacctggaggcccggaggataaccagtgcccggaaacgccccatcccctactatcggcccagcccctcctcatccggcagcctcagcagcacctcctcctggtacagcagcagcagtagccgctcggccagccgcagctactcccggagctggagtcggagccggagccggagacggagccggacccgcacgagcagcagctctagctcccgcagccctagtccgggctcccgcagccggagccggagcaggagccggagccggagccggagcaggagccagagccggagctacagctcagcagacagctactccagcacgaggcgctaagtgcccctgagccagctgcccgtgggggccccttcgcgctgccagcctcccccaaccacctgccctccccgccttcttggtgacaaatagtgagggctcctataccttgtccttcctgcttgcctaggggaagaggagaagagggtaagggggcttcactctctagatcagcctgctaggagcctctaccagcatcatcctggggcccagctcaggcctgggcatatggaaagaaccatcatcttgtggcacaaaaaaagaagaaagaaaagaaaacttcaaggttttgtgagaagcaatgggtctgtgactcaaaaattgagccctggccaggaaaatgtggagacagttcttctcctccactgctcacaggaggcccgtggtaattctccccacctccccggatgccccactagtccaacttcatggctgcacgtggatggacccccatgtctgagaggggtgaaagaggagaccaatggcagttcaggttcaagataacggggtcaggcctttaacttcctcaaacaggcccaagcaaaggctggaagacatttgggtcctagaagaagggatatccttgaataccagatggggacgtttgacttggtgggaggtgtcaggagataggagttggttannnnnnnnnnnnnnnnnnnnnnnnnnnnnnnnnnnnnnnnnnaatacctcagcannnnnnnnnnnnnnnnnncagcagatcccagctgtgaagaggccactgcatgnnnnnnnnnnnnnnnnnnnnnnccattcacaggggccctgcaacctcacgagaaaggagatagtggaagagtcaggacaggttggtctccagccccacttcccaaatatgcctcagccccactagctggcaccaacttaattccacgggnnnnnnnnnnnnnnnnnnnnnnnnnnnnnnnccagttgccaggccccagcgccagccagtctggccttaccctccggttggcgcctgccagccccctcccctctgcccaggctgccacgccctggatgccacccagtgcagcctggcacctacccacccacccttcagcttaagccactccccttgcctctcaggaattttgccaggatggggcacagcagctcaggtttgggggaaaagacccgaatccagagtgcaggggagaggggcttggatatgccatgtcttgggctcctgctggcttctgaggtttcttgtcagcttgggaaagacccacctttatttttgccctcaccccaagtcccccctggctggggctgggcagagagggtaagctgatctccgatccannnnnnnnnnnnnnnnnnnnnnnnnnnnnnnnnnnnaagaacggggaggtgaggaataagatccttaaaataaactcttgggcatccccctcaccagctgactggctttccggaggcttgtgggtgagtttcaagtttgtggtggcaacagcagcaggacagggcacggagggagcgagggagagaggaccggtcccagcttttggatattttgggttatggggaagcaagggccaaacattctttatccctcccaccccagggaaaacattnnnaaaatagtcctttttnttggaagcagtgacgtctccctacccaatctttcccatcctatcaacccatggggctagagactgccatgcaaccaccaccacgacagcccttcctccatcagaagacaggagtgagggccccgggcagcagtggacgacccagcctccccataccgggcctctggcccagacctaagccctgcccacaaagactaatggatgccagtgctgtcactgcagaaggccagatggcaggtgcctgggacaggggcaggtgccccggggagggcaagtacagccactgtaaataaccctcgtccctgcccaggaacccagactggacttcagtctccctccatggagacaaaggcttcccagagccaccaaaaaccttcttagcaggacagctgtgagaggcatcagaacctcacgttcggactgccttcatcaagacaactctaggggaccattttgcctggggctcctagcaaacctttttatttattttatttatttatctatttatttatttgatgactgtctctctttctcgccattagcagtattgaattatttatttatacagaggttttgtgtgtgtgtgtgtgtgtgtgtgtgtgtgtgtgtgtgtgtgtgttggggggatctcctaaattatttctgtgcatctcctttttttttctgctgttttttatggatgggatttgagaggccaaaggtgagtgggctattggccttctccctgaaggctctaagcctnnnnnnnnnnnnnnnnnnnnnngaaggaggcacatcagtcccaaaattcatcacttaacccagcgtccaggagggtcaggcctgtaccccagcctcctgtcccccaggaacctcacaggggtatcaaaaagatgtaaacagcccagaggcttatgagctacagtgatgaattgacacagtggagttgcaacttaggtgggggttggagtcgaaagttggcaaatggggccaaggctgcacaaagtcgaaatcccttgtgaatgtcccttagggaggcaccagattggagacagatgtgctatctcctaacagagtgatgaggcttcagttgagtacttgctgaagtagttgccttgtattttgagggccatggtggatgaaaatgatgtctggtttagtactggaattgcacttggggttgacaaggtgctcacaccatgagaatggaggcaggaattgagctgactgagggaagatgcaccttgatctcaccctcactccaaggcacatagcaggatcactccctagcttctctgagcacacctagttggtttcatgtatgttacacatgcttccactccacagtacctaatttctctctgtcccctgagatctgaaggctaccttgggaagaggcatcagccatcttgcttgagaaccaccaagccaaaagcaaaagcttttatctatgatctcttgctgtttcatcaggggaaagcacaaagctatttctgaaattaggaaaaaaaaaaaaaaaaa

SEQ ID NO: 8276 - DNA, 3624 bp, Homo sapiens
gcgccgagccggtttccccgccggtgtccgagaggcgcccccggcccggcccggcccggcccgcgcgctccgagccggtttccccgggccggtgtcggtgggcgagctcgcgggcccggccgcccccagccccagccccgccgggccccgccccccgtcgagtgcatgaggttgacgctactttgttgcacctggagggaagaacgtatgggagaggaaggaagcgagttgcccgtgtgtgcaagctgcggccagaggatctatgatggccagtacctccaggccctgaacgcggactggcacgcagactgcttcaggtgttgtgactgcagtgcctccctgtcgcaccagtactatgagaaggatgggcagctcttctgcaagaaggactactgggcccgctatggcgagtcctgccatgggtgctctgagcaaatcaccaagggactggttatggtggctggggagctgaagtaccaccccgagtgtttcatctgcctcacgtgtgggacctttatcggtgacggggacacctacacgctggtggagcactccaagctgtactgcgggcactgctactaccagactgtggtgacccccgtcatcgagcagatcctgcctgactcccctggctcccacctgccccacaccgtcaccctggtgtccatcccagcctcatctcatggcaagcgtggactttcagtctccattgaccccccgcacggcccaccgggctgtggcaccgagcactcacacaccgtccgcgtccagggagtggatccgggctgcatgagcccagatgtgaagaattccatccacgtcggagaccggatcttggaaatcaatggcacgcccatccgaaatgtgcccctggacgagattgacctgctgattcaggaaaccagccgcctgctccagctgaccctcgagcatgaccctcacgatacactgggccacgggctggggcctgagaccagccccctgagctctccggcttatactcccagcggggaggcgggcagctctgcccggcagaaacctgtcttgaggagctgcagcatcgacaggtctccgggcgctggctcactgggctccccggcctcccagcgcaaggacctgggtcgctctgagtccctccgcgtagtctgccggccacaccgcatcttccggccgtcggacctcatccacggggaggtgctgggcaagggctgcttcggccaggctatcaaggtgacacaccgtgagacaggtgaggtgatggtgatgaaggagctgatccggttcgacgaggagacccagaggacgttcctcaaggaggtgaaggtcatgcgatgcctggaacaccccaacgtgctcaagttcatcggggtgctctacaaggacaagaggctcaacttcatcactgagtacatcaagggcggcacgctccggggcatcatcaagagcatggacagccagtacccatggagccagagagtgagctttgccaaggacatcgcatcagggatggcctacctccactccatgaacatcatccaccgagacctcaactcccacaactgcctggtccgcgagaacaagaatgtggtggtggctgacttcgggctggcgcgtctcatggtggacgagaagactcagcctgagggcctgcggagcctcaagaagccagaccgcaagaagcgctacaccgtggtgggcaacccctactggatggcacctgagatgatcaacggccgcagctatgatgagaaggtggatgtgttctcctttgggatcgtcctgtgcgagatcatcgggcgggtgaacgcagaccctgactacctgccccgcaccatggactttggcctcaacgtgcgaggattcctggaccgctactgccccccaaactgccccccgagcttcttccccatcaccgtgcgctgttgcgatctggaccccgagaagaggccatcctttgtgaagctggaacactggctggagaccctccgcatgcacctggccggccacctgccactgggcccacagctggagcagctggacagaggtttctgggagacctaccggcgcggcgagagcggactgcctgcccaccctgaggtccccgactgagccagggccactcagctgcccctgtccccacctctggagaatccacccccaccagattcctccgcgggaggtggccctcagctgggacagtggggacccaggcttctcctcagagccaggccctgacttgccttctcccaccccgtggaccgcttcccctgccttctctctgccgtggcccagagccggcccagctgcacacacacaccatgctctcgccctgctgtaacctctgtcttggcagggctgtcccctcttgcttctccttgcatgagctggagggcctgtgtgagttacgcccctttccacacgccgctgccccagcaaccctgttcacgctccacctgtctggtccatagctccctggaggctgggccaggaggcagcctccgaaccatgccccatataacgcttgggtgcgtgggagggcgcacatcagggcagaggccaagttccaggtgtctgtgttcccaggaaccaaatggggagtctggggcccgttttccccccagggggtgtctaggtagcaacaggtatcgaggactctccaaacccccaaagcagagagagggctgatcccatggggcggaggtccccagtggctgagcaaacagccccttctctcgctttgggtcttttttttgtttctttcttaaagccactttagtgagaagcaggtaccaagcctcagggtgaagggggtcccttgagggagcgtggagctgcggtgccctggccggcgatggggaggagccggctccggcagtgagaggataggcacagtggaccgggcaggtgtccaccagcagctcagcccctgcagtcatctcagagccccttcccgggcctctcccccaaggctccctgcccctcctcatgcccctctgtcctctgcgttttttctgtgtaatctattttttaagaagagtttgtattattttttcatacggctgcagcagcagctgccaggggcttgggattttatttttgtggcgggcgggggtgggagggccattttgtcactttgcctcagttgagcatctaggaagtattaaaactgtgaagctttctcagtgcactttgaacctggaaaacaatcccaacaggcccgtgggaccatgacttagggaggtgggacccacccacccccatccaggaaccgtgacgtccaaggaaccaaacccagacgcagaacaataaaataaattccgtactccccacccaaaaaaaaaaaaaaaaaaaaaaaaaaaaaaacaaaaaaactccattcttcctaatacaagttcacttaccaattacttggccgctctttacacagttcggaatggtgaaacactgtccgatctccaacttaaatgctcttcatgaaaatctcctatttccaacttgcttatattcaaaacagcccgtaccttttgcctttccaaattgtgcccaccactattgctaaatgcaaatgtggacacttcctatttcgtattctccttaacattttcttacttctattgtacctcg

SEQ ID NO: 8277 - DNA, 1965 bp, Homo sapiens
  misc_feature (1662)..(1662): n is a, c, g, or t
  misc_feature (1907)..(1907): n is a, c, g, or t
gcaggccaggcctgcagtaccagacgggatagctggccactccacccctgcaccccaggtctcctccctctaccttttggggcaccctgggagcgtgggaagcaggtccgagggcccctgagctggcaaggggaggtgccaggccagctgtggtgccaagatactgagtgacctgggccctggctcagggagcatgtggggccaggcccagcgccccgtcttcctccttgtacccccgctgggcctggcctgggcagcgccccctgcagaggcctttgggtccttggtcctgtaacatgaagggggaggctggctggggacgaccgaccacaggctgggacacagctcctggtctgggggctccaagtgacagcatgcaggggagggggctcccagtcagtgctgtgttgggagctttctggaggctgtggactgaaggccttgagggaagcagtggctggaggagggtgctggacccatgacacgttgcttcctctggcttttccctgctgggccgctttctcagaggcacttccccacccctaacacccagtgggcccccccaggttctgtgccactcagagggaccctggcaggggccagaaccacttaagggtggtgctggagggccttgtgccccagtcccatcccaggacgccctgagggatggacgcagccatgcaccccccatctggggcctctccctgctccctctcccacctggcagctgggagttctggcttctaggcctgccctgtcaccaggcctctgagtggccaggcccttccacctccccatctgtaaaacgaggcagctgcccggacagccttggggtccttagtggccctgcaggtcctctggcagctctgctgaccccaccctctcccggactgcccttctgtcccagaggggtcaccctgacccggcccaccttgccactgggctttggactccagccctgacagggcccagccacactggctctgcccctcgaaggggctatgagcaaggtaggagggagctggtctcctttcttcgggccccacccaggccctgagcaccccccacccctgtgagggccccaggccttaagtccctggcggggtcatgggtttgcgacttgagcagagcggaggaacagggcactggaaggccgacgagctcagcatgcgactcggtgacggacaaggctcggcaggggcggtgtactttttttggtggttgcaatttggtgtggttggttgcacattcccaggacgtccagtatttttaacaaggttcttaaggtggcctttctaaccgtagcttaatgtttttcctccctccttgggctcccattggctggttaacataaaaagtttttaaaaaaaaagaaaaaaaagcctaatggagcttataaccaataaaaattccccccccatgggggaaaagggaaaggttttttataaggcaaaaccccttacaaagggtggaggttgggccacacccaacgcaatcatttagtagaacaatcttaacatcgagagaacgcaatacaactggagtgatgataggcgcccggcacgcctcacatacactgcatagcaaaacgccgcgagtcgaagcattgattaagtatacaccactatacatggatggcatggcgctccgtccataatcacncggaacgacgaaagtcagtatgatcgggagcggcgctgatgtggtatatcggaagatgggagccggagcgacagaggaataatatgagacgaatattgagaacaccgcttgaataccgcacatagccagtcgctagccagctcatgccacacagccaccgccataccgtcacgctgactctgtatacccgcaccacgcaacgaagcgagcagccctcggctatcgcaccacaccaacacatacanacacaataccacacacatctttgtgagcgtctacacctgttatcagcgcccagacacg

SEQ ID NO: 8278 - DNA, 1561 bp, Homo sapiens
ctcagcacgagggattcaggctggtacggttcctggcctggcccagttgcaccacgagcgctgcggacactcggggcggcagtcggtctgtcagtcctcccgccaggtcccgcggcccgcacctgccgcccgcacctgcagctccgcacctgcggccagtgcctactgccctctcttgccgcccgcacctgcagccccgcacctgccgcttgcacctgcagccccgcgctctacccggttcaagcatggctgaccaggcgcccttcgacacggacgtcaacaccctgacccgcttcgtcatggaggagggcaggaaggcccgcggcacgggcgagttgacccagctgctcaactcgctctgcacagcagtcaaagccatctcttcggcggtgcgcaaggcgggcatcgcgcacctctatggcattgctggttctaccaacgtgacaggtgatcaagttaagaagctggacgtcctctccaacgacctggttatgaacatgttaaagtcatcctttgccacgtgtgttctcgtgtcagaagaagataaacacgccatcatagtggaaccggagaaaaggggtaaatatgtggtctgttttgatccccttgatggatcttccaacatcgattgccttgtgtccgttggaaccatttttggcatctatagaaagaaatcaactgatgagccttctgagaaggatgctctgcaaccaggccggaacctggtggcagccggctacgcactgtatggcagtgccaccatgctggtccttgccatggactgtggggtcaactgcttcatgctggacccggccatcggggagttcattttggtggacaaggatgtgaagataaaaaagaaaggtaaaatctacagccttaacgagggctacgccaaggactttgaccctgccgtcactgagtacatccagaggaagaagttccccccagataattcagctccttatggggcccggtatgtgggctccatggtggctgatgttcatcgcactctggtctacggagggatatttctgtaccccgctaacaagaagagccccaatggaaagctgagactgctgtacgaatgcaaccccatggcctacgtcatggagaaggctgggggaatggccaccactgggaaggaggccgtgttagacgtcattcccacagacattcaccagagggcgccggtgatcttggggtcccccgacgacgtgctcgagttcctgaaggtgtatgagaagcactctgcccagtgagcacctgccctgcctgcatccggagaattgcctctacctggaccttttgtctcacacagcagtaccctgacctgctgtgcaccttacattcctagagagcagaaataaaaagcatgactatttccaccatcaaatgctgtagaatgcttggcactccctaaccaaatgctgtctccataatgccactggtgttaagatatattttgagtggatggaggagaaataaacttattcctccttaaaaaaaaaaaaaaaaaaaaaaaaaaaaaaaaaaaaaaaaaaaaaaaaaaaaaaaaaaa

SEQ ID NO: 8279 - DNA, 3752 bp, Homo sapiens
accgttaaatttgaaacttggcgggtaggggtgtgggcttgaggtggccggtttgttagggagtcgtgtgcgtgccttggtcgcttctgtagctccgagggcaggttgcggaagaaagcccaggcggtctgtggcccagaggaaaggcctgcagcaggacgaggacctgagccaggaatgcaggatggcggcggtgaagaaggaagggggtgctctgagtgaagccatgtccctggagggagatgaatgggaactgagtaaagaaaatgtacaacctttaaggcaagggcggatcatgtccacgcttcagggagcactggcacaagaatctgcctgtaacaatactcttcagcagcagaaacgggcatttgaatatgaaattcgattttacactggaaatgaccctctggatgtttgggataggtatatcagctggacagagcagaactatcctcaaggtgggaaggagagtaatatgtcaacgttattagaaagagctgtagaagcactacaaggagaaaaacgatattatagtgatcctcgatttctcaatctctggcttaaattagggcgtttatgcaatgagcctttggatatgtacagttacttgcacaaccaagggattggtgtttcacttgctcagttctatatctcatgggcagaagaatatgaagctagagaaaactttaggaaagcagatgcgatatttcaggaagggattcaacagaaggctgaaccactagaaagactacagtcccagcaccgacaattccaagctcgagtgtctcggcaaactctgttggcacttgagaaagaagaagaggaggaagtttttgagtcttctgtaccacaacgaagcacactagctgaactaaagagcaaagggaaaaagacagcaagagctccaatcatccgtgtaggaggtgctctcaaggctccaagccagaacagaggactccaaaatccatttcctcaacagatgcaaaataatagtagaattactgtttttgatgaaaatgctgatgaggcttctacagcagagttgtctaagcctacagtccagccatggatagcaccccccatgcccagggccaaagagaatgagctgcaagcaggcccttggaacacaggcaggtccttggaacacaggcctcgtggcaatacagcttcactgatagctgtacccgctgtgcttcccagtttcactccatatgtggaagagactgcacaacagccagttatgacaccatgtaaaattgaacctagtataaaccacatcctaagcaccagaaagcctggaaaggaagaaggagatcctctacaaagggttcagagccatcagcaagcgtctgaggagaagaaagagaagatgatgtattgtaaggagaagatttatgcaggagtaggggaattctcctttgaagaaattcgggctgaagttttccggaagaaattaaaagagcaaagggaagccgagctattgaccagtgcagagaagagagcagaaatgcagaaacagattgaagagatggagaagaagctaaaagaaatccaaactactcagcaagaaagaacaggtgatcagcaagaagagacgatgcctacaaaggagacaactaaactgcaaattgcttccgagtctcagaaaataccaggaatgactctatccagttctgtttgtcaagtaaactgttgtgccagagaaacttcacttgcggagaacatttggcaggaacaacctcattctaaaggtcccagtgtacctttctccatttttgatgagtttcttctttcagaaaagaagaataaaagtcctcctgcagatcccccacgagttttagctcaacgaagaccccttgcagttctcaaaacctcagaaagcatcacctcaaatgaagatgtgtctccagatgtttgtgatgaatttacaggaattgaacccttgagcgaggatgccattatcacaggcttcagaaatgtaacaatttgtcctaacccagaagacacttgtgactttgccagagcagctcgttttgtatccactccttttcatgagataatgtccttgaaggatctcccttctgatcctgagagactgttaccggaagaagatctagatgtaaagacctctgaggaccagcagacagcttgtggcactatctacagtcagactctcagcatcaagaagctgagcccaattattgaagacagtcgtgaagccacacactcctctggcttctctggttcttctgcctcggttgcaagcacctcctccatcaaatgtcttcaaattcctgagaaactagaacttactaatgagacttcagaaaaccctactcagtcaccatggtgttcacagtatcgcagacagctactgaagtccctaccagagttaagtgcctctgcagagttgtgtatagaagacagaccaatgcctaagttggaaattgagaaggaaattgaattaggtaatgaggattactgcattaaacgagaatacctaatatgtgaagattacaagttattctgggtggcgccaagaaactctgcagaattaacagtaataaaggtatcttctcaacctgtcccatgggacttttatatcaacctcaagttaaaggaacgtttaaatgaagattttgatcatttttgcagctgttatcaatatcaagatggctgtattgtttggcaccaatatataaactgcttcacccttcaggatcttctccaacacagtgaatatattacccatgaaataacagtgttgattatttataaccttttgacaatagtggagatgctacacaaagcagaaatagtccatggtgacttgagtccaaggtgtctgattctcagaaacagaatccacgatccctatgattgtaacaagaacaatcaagctttgaagatagtggacttttcctacagtgttgaccttagggtgcagctggatgtttttaccctcagcggctttcggactgtacagatcctggaaggacaaaagatcctggctaactgttcttctccctaccaggtagacctgtttggtatagcagatttagcacatttactattgttcaaggaacacctacaggtcttctgggatgggtccttctggaaacttagccaaaatatttctgagctaaaagatggtgaattgtggaataaattctttgtgcggattctgaatgccaatgatgaggccacagtgtctgttcttggggagcttgcagcagaaatgaatggggtttttgacactacattccaaagtcacctgaacaaagccttatggaaggtagggaagttaactagtcctggggctttgctctttcagtgagctaggcaatcaagtctcacagattgctgcctcagagcaatggttgtattgtggaacactgaaactgtatgtgctgtaatttaatttaggacacatttagatgcactaccattgctgttctactttttggtacaggtatattttgacgtcactgatattttttatacagtgatatacttactcatggccttgtctaacttttgtgaagaactattttattctaaacagactcattacaaatggttaccttgttatttaacccatttgtctctacttttccctgtacttttcccatttgtaatttgtaaaatgttctcttatgatcaccatgtattttgtaaataataaaatagtatctgttaaaaaaaaaaaaaaaaaaaaaaaaaaaaaaaaaaaaaaaaaaaaaaaaaaaaaa

SEQ ID NO: 8280 - DNA, 2599 bp, Homo sapiens
aaagtagagttgcttagttttgagcagtttagggctttttttattggccagtaggttattcattttgctgctaaatataattttttggttaattttaacattatagtgctggccgcttggttctatgattacctaaaaatctagtttttttcctccataggtagatgtgtgtgtatgcatacccccacacacacacgtacatatatgttgtcatagagaggtatttcaacccttatttcaaataacagtagaagatacgaacatgaatttatattttgtaaaaatgtcattcatccactttgttttccattggaaatagttttataagaagggttccccttgctctctccacttaacaatttcattatatacgtagaaaaagcagccgacttaagggcttgatgttttttcaggccttgtggattcaggtttccagtttcccagtgcccttaatggatgttatgaatgcataagcacattttcttttaaagaaagaagttagatttatagtgttatttcttacttgctatatttctttgcactaaaaaagagctatgtgtttgttttataggacactttagtaccgtattgcctacaataactcagtttgctccttaaattccaaactctgggaagttgataaataacttccatgatcacttgtaaaagttacatgcacatctgaaaaaaaatcacaaatctctatgacagtaggttatgttttgagcttgttaccttgcagtattcttctctgttccataggtgaaaacaaagggtgacagaggttatcaggcaggaaatgcctaaatacatacatctctgcatggtacaatttctcatattcatgtattccataaacagtgttttttctctgtttaagcagactgttgtttcttctgagtcagtgatatgtgatcttcgttggtttcattttgtgaagctcagtctgtctctgtaacatactttaggatttgcaccttgtgctccccaggaattatgttagtgtccttttctatgctgtcttcaaggatggacagaggcctaaaccacaacaacaacaaaaattagaaaaaaaaatacttagatttcggtaatcatccataggaactcatagcatcagtctcttttctctgtgaataatatctttgtgtaagttgtcataaaaaatcaacgttagaagatgacaattagaattcttcttaggtattgagggtaagaagttgtaaagaaagaaaattcgtgtttcaactaaaagattggattgcatatacctttgaagtggttttgtaaaaaaaagttcagttactaaactgagtgtgccctgtaatccttttgagtgcactgaagatgctttgaaaatactttgttggtcttcacattgtgcatcatgtcctgcaacttgtaaatatgtgcatgttgtttatgtttgtctgcctgtctcttattgcactaaattctgcaaggtgaataatttttttataccatttatttggaaaaagttcctcctccaactcttcttcactgaccttttaattagttggtaaacttagaaaaccaggtaggatttttgaagccctgagtttaaaagaagaatcgtggctatttgacatcatccttacattcccctgacttaaaaagctaacaagaagcacgagatcttccacctcattttagaaagcttttctacagaactatatgcttgcttatagctacctatctacagtttgaacagggagaaagggagatatgtatgtctggttacatcttccttcactcttgaattggctgggacagcaagcaacaacagtttgaggtccagtgacctacgtaaaatgagtgtcgtttgtgtcaggggacacatgtaactgtgcaacatggtattttctacagggagggctaggaagggtggttttggaacctaacctactttgtgtcttcattgtcagaactaaggttggaaatgccctttaaaggacttggtgaggcatatgctaggacaatagagctgctttagaaagaaattgagacatgttttgtcaggacagataaaagtttaatgcaggcttttgaacagatgttttaaaacaaatttgaccttaccaactatttttttcttctagccaaatcattgtacaggagtttcatatatgataaaaagtgttttgttattgtttttgctttcttggcaggggagaacccctaccattgtgagcagttactgtcactctggctgaatggacaaatagctgtgtaaatagcttctcataaaacgcttctactgatagctgtttgactttttcttcccgttatgaatgggaggaacatttgtaaacttcctttctgggtagctaccaaaaaacgtactggcttatggtcccatgtgaccttgtctccgttaagcccagaatctgagtgcctttagcaagtgttagcatttcacagagagaagagagacagaattattgctattaatcaccattcataaataggagcttggaataacaaaggtctgtgtgaattctgttctacgtcttttttttcccttttttaaataaatgtcaatttgatatcaagtaaaaaaaaaaaaaaaaaaaaaaaa

SEQ ID NO: 8281 - DNA, 1728 bp, Homo sapiens
ttgtcatgccttagccttccaagtagctgggattacaggtgtgtgccactacacctggctaagtagagatggggtttcgccatgttggccaggctggtcttgaactcctgacctcaagtgatccacctgcctccgcctcccaaagtgctgggattacaggcatgaaccactgcacctggcctgttacctctttcctacaattttgctcaagtctcccaactggtcttctggattcctctcttctgcggtcctgttcaaagcttaagtcagacagtgtcacttcactcgtctgtttaaaacctttcaatggcccccatttcacgtagaccaaagtccaacgtatttacctggcctactgatcttgctcctagctacctctgacctcatctcctgtcaatttccctctcattctgttccaccatcctgactgccttgacttcctcaacagaacaagcctgctactgcctcagggcctctgtccttattcttcctcttcccaggggtgtgctggtaaaatatttaacaaatagttctccgggaagggggagaaaaccctcatttgtagcatttgcaggtatctaggtgtaaatactctcatcaaggctatttttgagccactaatttgccttcactgaatacagagtttgggaagagatgcatgccatcagaacaaatgcaagccagcaccagcacaccactgcctcttcctgcaactcttgtccatacacaacctcatgactggctggctcacttcctgcaggtctctcctcaaatatcatctgatgagagacacattccctgactatgctttctaaaataggccatatgcccccacattcataccccatctgctgtcattctttattctttttataagtgcattattttcatagcacttatcactacctgttgtatattaatcaatgatcttttcccattagaatgtaagtttcatgaacaggtacttgttttaatactgtatctccagtcctaatgtgtaacaggagcccaataaatgtttgctttcaaatggagaggttaagtaacctgctcaaatcacacagctattaagtggcagaacaggttttcaagcaatgcatctggtggttttaactaagtcgagatagtttttattcctaatgcctaaatcagggcctaggtagtgagctgtgggcacatattaagtattggttaaactaaaaataataagcaaaatggacattatctataaaagcttttgtggaaatggctagagctagggtaaggaaacaaatttggttccccatacctgccctccaagaaaataaagctgtcaaggaaaatctgggctaagagtaggatatgagggatgatggataaggcatgagacatgagaaataagggggattaaattattattactattatacaaatgatgcctgagtagatttttaaaatgattaaatacccaatgatgtaaaaaacatttataaaataggaaagtaagactgactcaaccataatttgttgagtcaacccaaaaatctatttggttattttcaaacagaaatagcctacagatgatatctgagattgttccaaactttttctatgaatatgtatactttttttacataattaacataatactgtatattaatttgttacctgctttttcaattaacaatatatcataagcatctatgccaataaacacaattctgcatatttcaaaaaaaaaaaaaaaaa

SEQ ID NO: 8282 - DNA, 5052 bp, Homo sapiens
  misc_feature (828)..(832): n is a, c, g, or t
  misc_feature (903)..(924): n is a, c, g, or t
  misc_feature (1757)..(1772): n is a, c, g, or t
  misc_feature (4683)..(4683): n is a, c, g, or t
  misc_feature (4708)..(4708): n is a, c, g, or t
  misc_feature (4833)..(4833): n is a, c, g, or t
gcgcggcggccgtggttgcggcgcgggaagtttggatcctggttccgtccgctaggagtctgcgtgcgaggattatggctgctgttcctcaaaataatctacaggagcaactagaacgtcactcagccagaacacttaataataaattaagtctttcaaaaccaaaattttcaggtttcacttttaaaaagaaaacatcttcagataacaatgtatctgtaactaatgtgtcagtagcaaaaacacctgtattaagaaataaagatgttaatgttaccgaagacttttccttcagtgaacctctacccaacaccacaaatcagcaaagggtcaaggacttctttaaaaatgctccagcaggacaggaaacacagagaggtggatcaaaatcattattgccagatttcttgcagactccgaaggaagttgtatgcactacccaaaacacaccaactgtaaagaaatcccgggatactgctctcaagaaattagaatttagttcttcaccagattctttaagtaccatcaatgattgggatgatatggatgactttgatacttctgagacttcaaaatcatttgttacaccaccccaaagtcactttgtaagagtaagcactgctcagaaatcaaaaaagggtaagagaaacttttttaaagcacagctttatacaacaaacacagtaaagactgatttgcctccaccctcctctgaaagcgagcaaatagatttgactgaggaacagaaggatgactcagaatggttaagcagcgatgtgatttgcatcgatgatggccccattgctgaagtgcatataaatgaagatnnnnncggacgcgtgggtctgaaaactcatttggaagatgaaagagataatagcgaaaagaagaagaatttggaannnnnnnnnnnnnnnnnnnnnnagaaagttccatgtattgaatttgatgatgatgattatgatacggattttgttccaccttctccagaagaaattatttctgcttcttcttcctcttcaaaatgccttagtacgttaaaggaccttgacacatctgacagaaaagaggatgttcttagcacatcaaaagatcttttgtcaaaacctgagaaaatgagtatgcaggagctgaatccagaaaccagcacagactgtgacgctagacagataagtttacagcagcagcttattcatgtgatggagcacatctgtaaattaattgatactattcctgatgataaactgaaacttttggattgtgggaacgaactgcttcagcagcggaacataagaaggaaacttctaacggaagtagattttaataaaagtgatgccagtcttcttggctcattgtggagatacaggcctgattcacttgatggccctatggagggtgattcctgccctacagggaattctatgaaggagttaaatttttcacaccttccctcaaattctgtttctcctggggactgtttactgactaccaccctaggaaagacaggattctggcgcccaggaagaattctttttgaaaggcctttattcaatacccatttacagaagtcctttgtaagtagcaactgggctgaaacaccaagactaggaaaaaaaaatgaaagctcttatttcccaggaaatgttctcacaagcactgctgtgaaagatcagaataaacatactgcttcaataaatgacttagaaagagaaacccaaccttcctatgatattgataattttgacatagatgacttnnnnnnnnnnnnnnnntgggaagacataatgcataatttagcagccagcaaatcttccacagctgcctatcaacccatcaaggaaggtcggccaattaaatcagtatcagaaagactttcctcagccaagacagactgtcttccagtgtcatctactgctcaaaatataaacttctcagagtcaattcagaattatactgacaagtcagcacaaaatttagcatccagaaatctgaaacatgagcgtttccaaagtcttagttttcctcatacaaaggaaatgatgaagatttttcataaaaaatttggcctgcataattttagaactaatcagctagaggcgatcaatgctgcactgcttggtgaagactgttttatcctgatgccgactggaggtggtaagagtttgtgttaccagctccctgcctgtgtttctcctggggtcactgttgtcatttctcccttgagatcacttatcgtagatcaagtccaaaagctgacttccttggatattccagctacatatctgacaggtgataagactgactcagaagctacaaatatttacctccagttatcaaaaaaagacccaatcataaaacttctatatgtcactccagaaaagatctgtgcaagtaacagactcatttctactctggagaatctctatgagaggaagctcttggcacgttttgttattgatgaagcacattgtgtcagtcagtggggacatgattttcgtcaagattacaaaagaatgaatatgcttcgccagaagtttccttctgttccggtgatggctcttacggccacagctaatcccagggtacagaaggacatcctgactcagctgaagattctcagacctcaggtgtttagcatgagctttaacagacataatctgaaatactatgtattaccgaaaaagcctaaaaaggtggcatttgattgcctagaatggatcagaaagcaccacccatatgattcagggataatttactgcctctccaggcgagaatgtgacaccatggctgacacgttacagagagatgggctcgctgctcttgcttaccatgctggcctcagtgattctgccagagatgaagtgcagcagaagtggattaatcaggatggctgtcaggttatctgtgctacaattgcatttggaatggggattgacaaaccggacgtgcgatttgtgattcatgcatctctccctaaatctgtggagggttactaccaagaatctggcagagctggaagagatggggaaatatctcactgcctgcttttctatacctatcatgatgtgaccagactgaaaagacttataatgatggaaaaagatggaaaccatcatacaagagaaactcacttcaataatttgtatagcatggtacattactgtgaaaatataacggaatgcaggagaatacagcttttggcctactttggtgaaaatggatttaatcctgatttttgtaagaaacacccagatgtttcttgtgataattgctgtaaaacaaaggattataaaacaagagatgtgactgacgatgtgaaaagtattgtaagatttgttcaagaacatagttcatcacaaggaatgagaaatataaaacatgtaggtccttctggaagatttactatgaatatgctggtcgacattttcttggggagtaagagtgcaaaaatccagtcaggtatatttggaaaaggatctgcttattcacgacacaatgccgaaagactttttaaaaagctgatacttgacaagattttggatgaagacttatatatcaatgccaatgaccaggcgatcgcttatgtgatgctcggaaataaagcccaaactgtactaaatggcaatttaaaggtagactttatggaaacagaaaattccagcagtgtgaaaaaacaaaaagcgttagtagcaaaagtgtctcagagggaagagatggttaaaaaatgtcttggagaacttacagaagtctgcaaatctctggggaaagtttttggtgtccattacttcaatatttttaataccgtcactctcaagaagcttgcagaatctttatcttctgatcctgaggttttgcttcaaattgatggtgttactgaagacaaactggaaaaatatggtgcggaagtgatttcagtattacagaaatactctgaatggacatcgccagctgaagacagttccccagggataagcctgtccagcagcagaggccccggaagaagtgccgctgaggagctcgacgaggaaatacccatatcttcccactactttgcaagaaaaaccagaaatgaaaggaagaggaaaaagatgccagcctcccaaaggtctaagaggagaaaaactgcttccagtggttccaaggcaaagggggggtctgccacatgtagaaagatatcttccaaaacgaaatcctccagcatcattggatccagttcagcctcacatacttctcaagcgacatcaggagccaatagcaaattggggattatggctccaccgaagcctataaatagaccgtttcttaagccttcatatgcattctcataacaaccgaatctcaatgtacatagaccctctttcttgtttgtcagcatctgaccatctgtgactataaagctgttattcttgttataccaaaaaaaaaaaaaaaaaaaaactattaatatttaaataaatgctggggggtgatagttcttctttttaaaataaacattttcttttgaaaaaaaaaaaaaaaactgccgctgcaagtgtcgtggccgttgtttctcagaacgtctgaggcagcagatgaatcatctcagtgcaagagcttctgagcataacacgaaacccagaagccaaaggaagagccacgcgtgggcccctgtgaaactaaagcttttcgtgtaagacaacacanacaaaatttaaagacaaatgacggngaaaaggggagaaaatatattacaaaggattagtatccatcataccaaatacccgtgaaccagtcagaaacatcccagggggcaagtggaccaaggatgtgaacaggctagtctcagaagaaagnatacacatgctcatggccccgcactgtggctcacgcctgggatcccagcacctttgggaggccgaggcaggtggatcacgaggtcacgaagttgagaccagcctgcccacacggtgaaacccgtcttactataatacaaaaataaccaagggtggggacaagcacgctgtagtccacttctcaggagctgggaagagaaccgttgaccaggaggcgagg

SEQ ID NO: 8283 - DNA, 736 bp, Homo sapiens
accctttgtgttttttttttttttttttaaatacttacagctttattaggagaaggctgtggtcacctcagcagccagctcccttgtatacacagtatacacagcccagccagcacccaggtccttccatccttctgcagtacatggagtgcaaaagaaccaaacacaacggcggggagggagggtctaccaatgagtgtcagtgtctagtgcttccgggagccaactgccaggctagggacactcaagtccctcaaactgtcatcagctcctgccagaccccactccagcatgtcgaggttcatatgagagtgtttgggccagactcctccaatcagtgcacgcgatgggcagaggaggctagggaatcctgagcccaaagctgtattggtccatccccctcaagaagttgttggagctttcagaacgttcctcttcttgtgtagacatgagataccgctgtaactttactccatcaccagaaacctgtgccttgagtctagtctctgctcagccctcgagagcatggttggattaaggaaatagtcaaaggcaagcaagacaaactccctaggttgtcttggtcatgcgtcttttaaaaagggaaagaagaaaaaccaccacaacagataaaagcaccgaggcctggcttgtgtcaggagccagagaggttgtccttccttgaaatcggttcgtggagtgactgatggcaaaagctgctctcctctcctcgtgc

SEQ ID NO: 8284 - DNA, 3788 bp, Homo sapiens
  misc_feature (12)..(27): n is a, c, g, or t
agagtaaatgcnnnnnnnnnnnnnnnnttctgatcagtgcgatacataaggctgaggaagtgggacctccccttttgggtcggtagttcagcgccggcgccggtgtgcgagccgcggcagagtgaggcaggcaacccgaggtgcggagcgacctgcggaggctgagccccgctttctcccagggtttcttatcagccagccgccgctgtccccgggggagtaggaggctcctgacaggccgcggctgtctgtgtgtccttctgagtgtcagaggaacggccagaccccgcgggccggagcagaacgcggccagggcagaaagcggcggcaggagaagcaggcagggggccggaggacgcagaccgagacccgaggcggaggcggaccgcgagccggccatgtcggtggtggggttggacgtgggctcgcagagctgctacatcgcggtagcccgggccgggggcatcgagaccatcgccaatgagttcagcgaccggtgcaccccgtcagtcatatcatttggatcaaaaaatagaacaatcggagttgcagccaaaaatcagcaaatcactcatgcaaacaatacggtgtctaacttcaaaagatttcatggccgagcattcaatgaccccttcattcaaaaggagaaggaaaacttgagttacgatttggttccattgaaaaatggtggagttggaataaaggtaatgtacatgggtgaagaacatctatttagtgtggagcagataacagccatgttgttgactaagctgaaggaaactgctgaaaacagcctcaagaaaccagtaacagattgtgttatttcagtcccctccttctttacagatgctgagaggcgatctgtgttagatgctgcacagattgttggcctaaactgtttaagacttatgaatgacatgacagctgttgctttgaattacggaatttataagcaggatctcccaagcctggatgagaaacctcggatagtggtttttgttgatatgggacattcagcttttcaagtgtctgcttgtgcttttaacaagggaaaattgaaggtactgggaacagcttttgatcctttcttaggaggaaaaaacttcgatgaaaagttagtggaacatttttgtgcagaatttaaaactaagtacaagttggatgcaaaatccaaaatacgagcactcctacgtctgtatcaggaatgtgaaaaactgaaaaagctaatgagctctaacagcacagaccttccactgaatatcgaatgctttatgaatgataaagatgtttccggaaagatgaacaggtcacaatttgaagaactctgtgctgaacttctgcaaaagatagaagtacccctttattcactgttggaacaaactcatctcaaagtagaagatgtgagtgcagttgagattgttggaggcgctacacgaattccagctgtgaaggaaagaattgccaaattctttggaaaagatattagcacaacactcaatgcagatgaagcagtagccagaggatgtgcattacagtgtgcaatactttccccggcatttaaagttagagaattttccgtcacagatgcagttccttttccaatatctctgatctggaaccatgattcagaagatactgaaggtgttcatgaagtctttagtcgaaaccatgctgctcctttctccaaagttctcacctttctgagaagggggccttttgagctagaagctttctattctgatccccaaggagttccatatccagaagcaaaaataggccgctttgtagttcagaatgtttctgcacagaaagatggagaaaaatctagagtaaaagtcaaagtgcgagtcaacacccatggcattttcaccatctctacggcatctatggtggagaaagtcccaactgaggagaatgaaatgtcttctgaagctgacatggagtgtctgaatcagagaccaccagaaaacccagacactgataaaaatgtccagcaagacaacagtgaagctggaacacagccccaggtacaaactgatgctcaacaaacctcacagtctcccccttcacctgaacttacctcagaagaaaacaaaatcccagatgctgacaaagcaaatgaaaaaaaagttgaccagcctccagaagctaaaaagcccaaaataaaggtggtgaatgttgagctgcctattgaagccaacttggtctggcagttagggaaagaccttcttaacatgtatattgagacagagggtaagatgataatgcaagataaattggaaaaagaaaggaatgatgctaaaaatgcagttgaggaatatgtgtatgagttcagagacaagctgtgtggaccatatgaaaaatttatatgtgagcaggatcatcaaaattttttgagactcctcacagaaactgaagactggctgtatgaagaaggagaggaccaagctaaacaagcatatgttgacaagttggaagaattaatgaaaattggcactccagttaaagttcggtttcaggaagctgaagaacggccaaaaatgtttgaagaactaggacagaggctgcagcattatgccaagatagcagctgacttcagaaataaggatgagaaatacaaccatattgatgagtctgaaatgaaaaaagtggagaagtctgttaatgaagtgatggaatggatgaataatgtcatgaatgctcaggctaaaaagagtcttgatcaggatccagttgtacgtgctcaggaaattaaaacaaaaatcaaggaattgaacaacacatgtgaacccgttgtaacacaaccgaaaccaaaaattgaatcacccaaactggaaagaactccaaatggcccaaatattgataaaaaggaagaagatttagaagacaaaaacaattttggtgctgaacctccacatcagaatggtgaatgttaccctaatgagaaaaattctgttaatatggacttggactagataaccttaaattggcctattccttcaattaataaaatatttttgccatagtatgtgactctacataacatactgaaactatttatattttcttttttaaggatatttagaaattttgtgtattatatggaaaaagaaaaaaagcttaagtctgtagtctttatgatcctaaaagggaaaattgccttggtaactttcagattcctgtggaattgtgaattcatactaagctttctgtgcagtctcaccatttgcatcactgaggatgaaactgacttttgtcttttggagaaaaaaaactgtactgcttgttcaagagggctgtgattaaaatctttaagcatttgttcctgccaaggtagttttcttgcattttgctctccattcagcatgtgtgtgggtgtggatgtttataaacaagactaagtctgacttcataagggctttctaaaaccatttctgtccaagagaaaatgactttttgctttgatattaaaaattcaatgagtaaaacaaaagctagtcaaatgtgttagcagcatgcagaacaaaaactttaaactttctctctcactatacagtatattgtcatgtgaaagtgtggaatggaagaaatgtcgatcctgttgtaactgattgtgaacacttttatgagctttaaaataaagttcatcttatggtgtcatttctaaaaaaaaaagatctatttctggctccctcaggggggggcccgggcccccaaattcgccctattgttgagtcgttttttccgcccccctattgggctgtcgtttttaaaaaccttctggactg

SEQ ID NO: 8285 - DNA, 565 bp, Homo sapiens
  misc_feature (543)..(543): n is a, c, g, or t
tcattaaattagtctttatagtagccaagaaatagaaacaacttaattaacaaatagaaaatctattaagggtggaaggaggtaagttcataatccatatagtagaataactacagccattaaaagtgataccaagtgtgtatattgatagggaaagatacttgccatgtaatttaaaaagcaggccacaaatagacactgtcggatgctattttttttaaagtaaatacatatatgtaggaaaaatactggaagatgatatgtaaaaatattgttagcgattatatctggatctatctaattatgtgctctttatttttagagttttctatattgacttatttgtttacttataaaagaggagaaataagtgtcattttaaagctggaggacatttaaagctggagctgacattacagttgaatgtcaaacggactgatattaaatgcagagtcaggtgtcagctgggtcactatctggcagggatctaaggtgtccattaaactattgcagatgccctgctggtgccatgatggatgagcngggaagggcgccggattgccct

SEQ ID NO: 8286 - DNA, 2248 bp, Homo sapiens; identical to SEQ ID NO: 6478
  misc_feature (716)..(737): n is a, c, g, or t

SEQ ID NO: 8287 - DNA, 3586 bp, Homo sapiens
tgcttaatattatctgagatcattgagaacccagatcagacagaatagcttgaataagttacattttccaattaccctttttccacatctgtagaaagagggtaatattttttaataggtattttccccactggagcatattacgtttgcctaagatgtataaaagtttgtttaagatgtgtaaaagtttgcttaaggaactgaggatccttaaataaaaatattagaaattagaaattgaacctaatactaaacagtaaattcagcttaacctgaaccttggcatagtcagagcttcctcctacatctaaagtatttgctctctgttttagttaaagtcataatttgcgctgatgtgtaatcactttccaagaagagggcaatgagaaaagatatttaaagctttctctccatagccctccaagacttctgggacaactaaatttactttcaccattacggtgagaggaggtgagaaaactctagtattttgttggcagagtaatcactttgttctcatcgctcaaagcatttttaggattatttttctagcgtaacctttagagagaactggaagaaaaaggaaattggtctactaggtattgtagacacaaataagtaacattaggctaaccccttatgagacatttccacacaatttcatcgtgcctgtacttttctctatggtaaaagccagtgtttacactttgtagggatcagggtgtatttgttgaattaaacaaaatattttcaatgatggcaagtctcttgacttttgaaagcaagtcagattccttatagctaatgctggtgaaaaatgttaaattggagagatcccttttgggagtgaaaccaaattgtaactatgaggagaagatggtcttctcattggctcttgatgtagctctgaagggagttccagaagaggagctctcacagaatgttgagcctgtgggcccaagacattgacttcgaagggtagttctcattaggatgtataagtagtggcttgaggcaccttcttatcattttttgcatgttattctgattattaaacttcccccaatgtcatattccatgatgagggatttctgaactccatagtccagcgttgttgcttttctctcttctttgctactgaaaattgccagcagtaccgccatgagcacaccaaatctacccccacttatgtttgttctgccccatttcccaggagcagcttctagcacatatgtagagtatctggcaccaccttagcccagggctgcgtgcccgatcagtggggattctgttcccccaccccccagactgcaagagcttcttaagaaggagcccatattcccatttgtagctggaaagcgggtgaatgacatgacatggggcacctaggaaagatgattattagaggagtgcagcggaaaaaaatttgcactcttctccttttggttattactttccaaatatattaacaaaaagttgatgcttttaactttatattttcagaaaagtgtttttaattaaaaatatgtgatagggaccaaataagtaaagtacatttttctccactaaatttgaagtgagggaaagaggagccaaagtaagagatttttttttaaggaaacttaatctgattgtgaaaatcatacatatggagaaacatcagataaggcaatagagtcagagggtcatgagcaatagacgatgatgcgaggcatttggggagcttcctggaggaaaattaagtttttttcctagcaaactaccatgtcctacaagaacttggttatataatggtgcgtctctgaatcactgattaaaaccagttgcttctgattttagtcacaggttttacaagtattcagctctccctcatgtttcatttctttttttaagataatctatcaaccttttttaaattttaaaatttttagatgtagagtttataagtaaaatatatttttagccattgttctgttagctgagctgatgtgtttggtcttagagggcctgacttcagatactctttgtgatcttgtaagggctctacacaaacttcattatgtatggtaaatttgtattcttatggattgtatatagaatgctttcgttagaagtacattctacttctgtatgtccctttgtaatccgcagttgcttactcaggggtttcatagtcatttcataaaaaataattcactagctgtctaatggtattttaagactgtttatctgtatcacaacgtcattaggagttctttcaacaattccataaatatactgtttactagaccttccctgtaaatgttcccaattcccatcctgtctcagacagtcaatagtcctgtgtacagtgactatttgcatgatttctcattgcactgctgcattcaggcactccagggcatgattaaacagtcattaacagtgcctctctggtacagttgatgcatgcattgatctttcttctctgctgtttttatatagcctttaattaaaaggaaaaaaataccactactctgcaatgcaaaagtcttcaaaattctttgtttcctgtattaatcacttctgttccagagtgaacaaatgttttcagctaagctatgtgagaatgtaagaataatatcctgcttgttctaaatagttcatatatttaaagtgtggtcagtatttcctccctgtaccttacaaacagaaaccaccctgggatggttgataccccttacaaagtcgatcttacccacacagactcctgtgtatgcgtgtctgtttataggtgtatatggagtcagtgttgataggaaggatgctctagaagtacttctgttgtttcctagaaggctatgagccagttccatggcatgtttaatgtataattcccatgtatcatgagaatttcactagaatgtcattaaacagcccaactacctcatgtgaaattggctgtggacaatctgtgtcagatgagaaatgtgttcagacaaatttaatctggttaatagacttaacaaattaatgtctacataaagaagaaacatgatagaccagatgccaaaggctaaaatgtacatagatttccttggattaatttttaagtcactgtttaattccatgcctagtattcttatgaatgtttgtggtttcatagatttatgcactttgaatatctgtcacgtgcagtgttaatgttacctgttcttgtctctcagcattttgaatgagcatcataatcagagtagaaggcaagttaaactataaaagtgtcaagtggcttgttaacttcttaatttaatggacctttacttagaatataatatgttggagcctcttgggaccaaccgatgagcgacagtttcatgtttagatttgtattgtttctctgtccaagtccttattctctatcttgtggggaggggtgacaggggagggttttactttttttgcaaaaatgtttgaaaatatctgtcagattttatattcgttagttataataaacttatttttaaagtaaaaaaaaaaaaaaaaattttgtgtggttttctgcctaattgaatatgtcaataaaaagtctcgtttatggaaaaaaaaa

SEQ ID NO: 8288 - DNA, 2341 bp, Homo sapiens; identical to SEQ ID NO: 6973

SEQ ID NO: 8289 - DNA, 486 bp, Homo sapiens
gtgccaccccgggtgaaggatgccactctgggtgttcttctttgtgatcctcaccctcagcaacagctcccactgctccccacctccccctttgaccctcaggatgcggcggtatgcagatgccatcttcaccaacagctaccggaaggtgctgggccagctgtccgcccgcaagctgctccaggacatcatgagcaggcagcagggagagagcaaccaagagcgaggagcaagggcacggcttggtcgtcaggtagacagcatgtgggcagaacaaaagcaaatggaattggagagcatcctggtggccctgctgcagaagcacagcaggaactcccagggatgaagattcctcctgtgacccgggctacctgtagccaaaatgcaactggatccagttaatcctctcatttctgacccactttttcctttgaaaatacaataaaattcccccataccggtgtgcatttaaatgttaaaaaaaaa

SEQ ID NO: 8290 - DNA, 2995 bp, Homo sapiens
caaaagggaactttatatggaaaagcttcaagaacatttaatcaaagcaaaagcctttaccataaagaagacgctggagatctatgtgcccatcaaacagttcttttacaacctcatccacccggagtatagcgccgtgactgacgtgtatgtactcatgttcctggctgacactgtggacttcatcatcattgtcttcggcttttgggcctttgggaaacactcagcagctgcagacatcacctcttcactgtcagaggaccaggtcccggggccgtttttggtgatggtcctcattcagtttggaaccatggtggtggaccgagccctctacctcaggaagactgtactgggaaaggtcatcttccaggtcattcttgtgttcggaattcacttctggatgttcttcatcttacctggtgtgactgagaggaaattcagccagaacctggttgcccagctttggtactttgtgaaatgtgtttacttcgggttgtctgcttaccagatccgttgtggctacccaacgcgagtcctggggaacttcctcaccaagagctacaattacgtcaacctcttcttattccaagggtttcgcctcgtgccctttttgactgagctgagggcagtgatggactgggtgtggacggacacaactttgagcctgtccagctggatctgtgtggaggacatctatgctcacatattcatcctgaagtgttggcgggagtcggagaagcctattttcacaatgagtgcccaacaaagccagttgaaagttatggaccagcagagctttaacaaatttatacaagctttttctagggacaccggtgctatgcaatttctggaaaattatgaaaaagaagacataacagtagcagaactggaaggaaactcaaattctttgtggaccatcagcccactctggaaaattatgaaaattacacgagctcctggaccccaatagtagcttctctgttgttttttcatggagtattcagagaaacttaagtctgggtgcaaaatcggaaatagcaacagataagctttcttttcctcttaaaaatattactcgaaagaatatcgctaaaatgatagcaggcaacagcacagaaagttcaaaaacaccagtgaccatagaaaagatttatccatattatgtgaaagcacctagtgattctaactcaaaacctataaagcaacttttatctgaaaataatttcatggatattaccatcattttgtccagagacaatacaactaaatataacagtgagtggtgggttctcaacctgactggaaacagaatatacaatccgaactctcaggccctggaactggtggtcttcaatgacaaagtcagtcccccaagtctggggttcctggctggctatggtattatgggattatatgcttcagttgtccttgtgattgggaaatttgtccgtgaattcttcagtgggatttctcactccatcatgtttgaagagcttccaaatgtggatcgaattttgaagttgtgcacagatatttttttagttcgagagacaggagaactggagctagaagaagatctctatgccaaattaatattcctatatcgctcaccagagacaatgatcaaatggactagagaaaaaacaaattgaaaccttagaacacagactgcaaataatgttaacatttgaattttttttaaaagcacaatattctcataagagctaagcatttctagttcgacggaaatggtttgtttctcttctgataggtagacaaaaggagctgatatccttctgcagtaaaagctacctggcaagttaaggcactgttgaaaatgttatttgtaactccatttctctgaaatcagggctacttgctttatgttttagtcaacagtgtctcgcattctgattgatcatgtgaaggaatcatttatgggccccgtccctaagagaaacagaagaggagtcagaaagaaagatgcctgtgttttcctctgtggggcccgtgcacttcctggagagatgctacaatgcaatatacagcgctccatccccactggggaagctgctgtgatgagactagatgagccttcaacacactcagaaaatgcaacagcaatagggggcagacagctcctacctgtgtttctaggagcaaaagagagggaactaattgcccgtgaagacgccagtggaaggatcagcctcattctaagcaaaaacatagtattagtgatactcttactgccttatcttaaccaaggactaataggatacctttccattaaacaccagtgacttctcaggaaaaaaaaaaaaaaaaaacaaaacaaatgatgtgtacacctgctttgttatggtccaccagtgaccagcttcaatgagggaaccattctggagggctgcggtctcctgtgcaaacagacatgaggcagaagagtaaaaagaccaacccagtgggacctagaatactttgtaactctttaataactgaggtcaggaccgctcttctgccttccccttcccttaacgtgctttttcccatttccatgatttaaggcaatggtttttccagtatgtgacattttccttcctgtttttcaggtatatcaaagagtttacatattccaattcacatttttacatctgagacgggttttttaagttcataattatgaaagaaatatgtatattgagcttggggaaataaaaatggccttttcttaaattattattattggtaatacaacctcttcattaaataacaatgtagcatgaaaaatttatgattgaaatgtagttttcattccatattaagatacagtttctgagaagaatcattgaatggactagaatatgtcaaaaattgatcctgtgtagtttgggttcagggctgacttaaaataaagcacatcctgcaaagtcaaaaaaaaaaaaaaaaaaaaaaaaaaaaaaaaaaaaaaaaaaaaaaaaaaaaaaaaaaaaaaaaa

SEQ ID NO: 8291 - DNA, 1544 bp, Homo sapiens
gggtgctatagacgcacaaacgaccgcgagccacaaatcaagcacacatatcaaaaaacaaatgagctcttattttgtaaactcattttgcggtcgctatccaaatggcccggactaccagttgcataattatggagatcatagttccgtgagcgagcaattcagggactcggcgagcatgcactccggcaggtacggctacggctacaatggcatggatctcagcgtcggccgctcgggctccggccactttggctccggagagcgcgcccgcagctacgctgccagcgccagcgcggcgcccgccgagcccaggtacagccagccggccacgtccacgcactctcctcagcccgatccgctgccctgctccgccgtggccccctcgcccggcagcgacagccaccacggcgggaaaaactccctaagcaactccagcggcgcctcggccgacgccggcagcacccacatcagcagcagagagggggttggcacggcgtccggagccgaggaggacgcccctgccagcagcgagcaggcgagtgcgcagagcgagccgagcccggcgccgcccgcccaaccccagatctacccctggatgcgcaagctgcacataagtcatgacaacataggcggcccggaaggcaaaagggcccggacggcctacacgcgctaccagaccctggagctggagaaggagttccacttcaaccgttacctgacccgcagaaggaggattgaaatagcacatgctctttgcctctccgagagacaaattaaaatctggttccaaaaccggagaatgaagtggaaaaaagataataagctgaaaagcatgagcatggccgcggcaggaggggccttccgtccctgagtatctgagcgtttaaagtactgagcagtattagcggatcccgcgtagtgtcagtactaaggtgactttctgaaactcccttgtgttccttctgtgaagaagccctgttctcgttgccctaattcatcttttaatcatgagcctgtttattgccattatagcgcctgtataagtagatctgctttctgttcatctctttgtcctgaatggctttgtcttgaaaaaaaatagatgttttaacttatttatatgaagcaagctgtgttacttgaagtaactataacaaaaaaagaaaagaaaaaaaaaaacacacaaaaagtcccccttcaatctcgtttagtgccaatgttgtgtgttgcactcaagttgtttaactgtgcatgtgcgtggaagtgttcctgtctcaatagctccaagctgttaaagatatttttattcaaactacctatattccttgtaattaatgctgttgtagaggtgacttgatgagacacaatttgttcgacgtgtagtgactagtgacctctgtgatgaattgtgttactacatgcggtgtgtccctgcgtgcctttataggaccctttgcacgaactctggaagtggctcttataagcgcagctttagtgatgtatgttttggtgaacaaagttacaaatattgtccaagtctg

SEQ ID NO: 8292 - DNA, 2161 bp, Homo sapiens
ggacgcgtggttacccggggaagcactcgcgtgggagtttgtgcgagcgcggtacggggcggggcccgcacggaggaggcgccgggaccatggtcaccctcggctgagtttccggcggcgactttgattattggcaaataaccaccataacaataccgagcccccgggcttgcaccgcacgcactgactccgcgagcccgcacacggccgcgtcgcccgccaccgggccctgagcgccagccccaaacgagccgatggaaaaatccaaaaatttccgcatcgacgccctgctggcggtggaccccccacgagccgcctctgcgcagagcgcgccgctggccttggtcacgtcgctcgccgccgccgcatctggcaccggaggtggcggcggcggcggcggggcgagcggcgggactagcggcagctgcagccccgcgtcctcggagccgccggctgcgcccgccgaccgcctgcgcgccgagagcccgtcgccgccgcgcctgctggccgcgcactgcgcgctgctgcccaagccgggcttcctgggcgcgggcggcggcggcggcggcacgggcggcgggcacggggggccccaccaccacgcgcatccgggcgcaggggccgctgccgccgccgccgccgccgccgccgccgccgccgctgggggcctggcgctggggctgcaccctgggggcgcgcagggcggcgcgggcctcccggcgcaggcggcgctctacggccacccggtctacggctactccgcggcggcggcggcggctgcgctggcgggccagcacccggcgctctcctactcgtacccgcaggtgcaaggcgcgcaccccgcgcaccccgccgaccccatcaagctgggcgccggcaccttccagctggaccagtggctgcgcgcgtccaccgcgggcatgatcctgcctaagatgcccgacttcaactcccaggcgcagtcgaacctcctggggaagtgccgccggccgcgcaccgccttcaccagccagcagctgctggagctggagcaccagttcaagttcaacaagtacctgtcgcggcccaagcgcttcgaggtggccacctcgctcatgctcaccgagacccaggtgaagatttggttccagaaccggcggatgaaatggaaacgcagcaaaaaggccaaagagcaggcggcgcaggaagcggagaaacagaagggcggcggcgggggcgcggggaagggcggcgcggaggagccgggagccgaggagctgctggggccgccagcgcccggagacaagggcagcggacgccgcctgcgggacttgagggacagtgaccccgaggaggacgaggacgaggacgacgaggaccatttcccctacagcaacggcgccagcgtccacgccgcctcctccgactgctcctcggaggacgactcgccgcccccgcggcccagccaccagcccgcgccccagtaggagccccgcggcccagcaggtgcggcgcgcacggagcgccccggccggcggcttctcccggaggccccggcgcccgcacccacccggcccggccccgagagcaggctcgaccgccgccccatggacccctcgcccaggccggggctggagggattcggccgcggcctccggtcctgggcgcttcccttttaagcaagggcgcctcacctgctcttcaagaaacagcgagagggagacccagggggctgaaacttgaactctggttcttttaaaattaattttggttggtgttgggggaggcgcgagtgcgtgtgagaagaaccgacccaccccgcgcaaggggaagcctcctgtctcccctttccccgcgtccgagaaggcggaaacccacagtgttacctgacttatgaaacttgaaaccgcctctggagccgccattctgcagagtatttggaaaaagaaaaaagggtttatgcttacgtctctggggtcggggggattatgtcacgagcgttcaaactgctggaaatctcaaaactgtactgtctttatttttgtatattgtatttatatataaaaagaaacgtctacgtatgcatgctaaattattatttagcttctcccatcgcccacgatggaatgtaaaataaattggttttgtactggataaaaaaaaaaaaaaaaaaaaaaaaaaa

SEQ ID NO: 8293 - DNA, 402 bp, Homo sapiens
gcacgagcccttctcctggcttttcaggtcccagcttcccttgactgtgactcccaaaagaatagagagactttgctatcctggctgcagtgccaaaattatagagaccaagcggaaacctcccccttgccctctgaagtttcactgaaaaatcaactttctttataaggaaagggagaaaggagagtcggggaatgtagacaattcttttgagggacagtaaataattattagggagaatgaattcctctcctccctaccatttattaaggtataattgatgattaaaaattgtatgtgtttacactgtgtatgatgttttgatatatatatacattatgaaattaataaagcaagctagttaacataaaaaaaaaaaaaaaaaactcgagggggggcccg

SEQ ID NO: 8294 - DNA, 1792 bp, Homo sapiens
  misc_feature (1175)..(1258): n is a, c, g, or t
ggagctgggaagcggagaagccgggagcgcggggctcagtcggggggcggcggcggcggcggctccggggatggcggcggctccgctgctgctgctgctgctgctcgtgcccgtgccgctgctgccgctgctggcccaagggcccggaggggcgctgggaaaccggcatgcggtgtactggaacagctccaaccagcacctgcggcgagagggctacaccgtgcaggtgaacgtgaacgactatctggatatttactgcccgcactacaacagctcgggggtgggccccggggcgggaccggggcccggaggcggggcagagcagtacgtgctgtacatggtgagccgcaacggctaccgcacctgcaacgccagccagggcttcaagcgctgggagtgcaaccggccgcacgccccgcacagccccatcaagttctcggagaagttccagcgctacagcgccttctctctgggctacgagttccacgccggccacgagtactactacatctccacgcccactcacaacctgcactggaagtgtctgaggatgaaggtgttcgtctgctgcgcctccacatcgcactccggggagaagccggtccccactctcccccagttcaccatgggccccaatgtgaagatcaacgtgctggaagactttgagggagagaaccctcaggtgcccaagcttgagaagagcatcagcgggaccagccccaaacgggaacacctgcccctggccgtgggcatcgccttcttcctcatgacgttcttggcctcctagctctgccccctcccctggggggggagagatggggcggggcttggaaggagcagggagcctttggcctctccaagggaagcctagtgggcctagacccctcctcccatggctagaagtggggcctgcaccatacatctgtgtccgccccctctaccccttccccccacgtagggcactgtagtggaccaagcacggggacagccatgggtcccgggcggccttgtggctctggtaatgtttggtaccaaacttgggggccaaaaagggcagtgctcaggactccctggcccctggtacctttccctgactcctggtgccctctccctttgtccccccagagagacatatgcccccagagagagcaaatcgaagcgtgggaggcaccccnnnnnnnnnnnnnnnnnnnnnnnnnnnnnnnnnnnnnnnnnnnnnnnnnnnnnnnnnnnnnnnnnnnnnnnnnnnnnnnnnnnnacagcaataagcacgtcctcctcccccactcccacttccaggattgtggtttggattgaaaccaagtttacaagtagacacccctgggggggcgggcagtggacaaggatggcaaggggtgggcattggggtgccaggcaggcatgtacagactctatatctctatatataatgtacagacagacagagtcccttccctctttaaccccctgacctttcttgacttccccttcagcttcagaccccttccccaccaggctaggccccccacacctgggggaccccctggcccctcttttgtcttctgtgaagacaggacctatgcaacgcacagacacttttggagaccgtaaaacaacagcgccccctcccttccagccctgagccgggaaccatctcccaggaccttgccctgctcaccctatgtggtcccacctatcctcctgggcctttttcaagtgctttggctgtgactttcatactctgctcttagtctaaaaaaaaaaaaaaagagataaaaataaaaaaaacacc

SEQ ID NO: 8295 - DNA, 936 bp, Homo sapiens
  misc_feature (878)..(878): n is a, c, g, or t
  misc_feature (880)..(880): n is a, c, g, or t
  misc_feature (891)..(891): n is a, c, g, or t
  misc_feature (898)..(898): n is a, c, g, or t
  misc_feature (926)..(926): n is a, c, g, or t
aaagggtcttcatgtggaagctttttacttaagtctgatgaaatagaaaactttttttttttttttttttgcatttaaaattgttttttattgttttgttgggcagtatgaaatatacagtcaaggcagattcgtacagacttgtaaagtcatctcaggaatcttttatgcttaaagtttcctcagccccatttatattcactactatcattcactctttaccactcatatcttccctgctgtctaatcactaatatcttccctcctgtctaatcactaatgtcttccttcctgtctaatcactgagttaagggaaaaatagtcatttacttacaggaatataatgggtattaataacaaaattccatttccccattaaaagctatgtctaagaaaaaaaatagtggaggcattatttaaaacttctaaatggcctggtgagtatagtcttagtttagcttccttacttttttgtatgcccaacctgaaatgatgtcatcccgtatcatcacagtatgttgctttttcagtacgaagttaatgggctttcctgctgtttaactgctttgagattttaaaaattcattcagccacatagtattcaaagcatggagctgggtgccacaaagacttgggcctggcatcacccagaagctcaaggaaggcagaggatgagcaccttctccattatacttggtacttgattgttcatggaattaaaatttaaatataaatgaactatatataaatgccataataaaaatatacgaaagtgctttggaagtacagataagaaaagtgacacttctagcctgagaatcagggaagaatggtccttcaaggacttgaacaaatgaacggaattaaggcaaagacgntnggactagcttntcagtcngaggcagagtggagatatggcagagcangtggtttggg

SEQ ID NO: 8296 - DNA, 1177 bp, Homo sapiens
ttttttttttttttttttagtttcttctaataaccattgctgaattcttttttatttagccactctcatttcataggcaaagcaagtccaattacatttcatgttatagcaattatctatgtatgttttcctcactccattaaaatttcaccttttccccgacccacattctgcagtgaattcagatctattttccatttttttctcacattatttatatagctacactatcacttccacttccttctcttgggatataggtagcatttggcaacccattttagcaggttgcttatgctcaacccatgacaaaatatcacatcctcactttctcatcactctagaaatctttctgttgtgtaaaccacctgtgattttcagcactgtaacaagcttgagaggatccaattaggaagtttgggacctgagcatagtagacactcaagaaacgtgtttcagtggaagaaatgaactttccatagtaaaacagtcacagagaaacctaaaagtataaatttaggagtcaggtgaaaaaaatgggaactgtatactttatacctacttttttccttcaggatgaccttgaatgtcaaaacctagtgaaatcaaggctaatgtgtattgaaaattcatttaagcttgaggcatttaatttttgcctgtttaactaaatctctacacatctaatgttatatacacattagtttctatcataacatatctttcattaagcttctctttaatatttccatatctgagggaaggtgtaaccagtggtcacatagaaatctttaagatacttccaactgtttttttttcaaacctactggctccatatggcagttatggcataacaggagaaggggaagtaaaacagggaagggagtcctttacatattttaaggcttcaaagctgggaataaaaggcctgaaagcagcttactcttttctgtaattttaagatcactctctagtgtgaaatctctatttgatggacaccttcctaagttacactcataaggcctcattaggatgtacagttgacccttgaacaacacatttgaactgtacagatccatttatactggaattttttttttcaactgaacagagtttgaaagcacattattcagggatgggaaacctgcatagatgtagggcttttcatatacacagg

SEQ ID NO: 8297 - DNA, 3751 bp, Homo sapiens
ccgctgaggttcctgcgtgaagacaagttgggagcccaattgtttgttgcaactccaactccggccccttcaccatgcactccttggacgagccgctcgacctgaagttgagtatcaccaagctccgggcggcaagagagaagcgggagaggacgctgggtgtggtccggccccgtgctctgcacagggagctgggcttggtggatgacagcccaacacttggctctccaggctccccgccctcaggcttcctgctgaactccaagttccccgagaaggtggagggacgcttttcagcagcccctctcgtggacctcagcctgtcaccaccatctgggctggactcccccaatggcagcagctcgctgtcccccgagcgccagggcaacggggacctgcctccagtgcccagtgcctcggacttccagccactgcgctatttggatggtgtccccagctccttccagttcttcctgcccctcggctccgggggggccctgcacctgcctgcctcctccttccttacccctcccaaggacaagtgcctctcgccagacctgcccctgcccaagcagctggtgtgtcgctgggccaagtgtaaccagctctttgagctcctgcaagacctggtggaccatgtcaacgattaccatgtcaagcccgagaaggatgcggggtactgctgccactgggagggctgcgcccgccatggccgaggtttcaacgccaggtacaagatgctcatccacatccgcacacacaccaacgagaagccacaccgctgtccgacctgcagcaagagcttctcccgcctggagaacctgaagatccacaaccggtcgcacacaggcgagaagccctacgtctgcccctacgagggctgcaacaagcgctattccaactccagtgaccgctttaagcacacgcgcacccactatgtggacaagccctactactgcaagatgcccggctgccacaagcgctacacggaccccagctcactgcgcaagcacatcaaggcccatggccactttgtgtcccacgagcagcaagagctcctgcagctgcgcccaccccccaagccgccactgcccgcccccgacggcggcccctatgtcagtggggcccagatcatcatccccaacccagctgccctctttggaggccctggcctgcccggcttacccctacccctggcccccggcccccttgacctcagtgccctggcctgtggcaacggtgggggcagtgggggtggggggggcatgggccctgggctgccaggccccgtcctgcctctcaatctggccaagaacccgctgctgccctcgccctttggggctggcggactgggcttgcctgtggtctccctccttgctggcgcagctggtggcaaggccgagggggagaaggggcgtgggtcggtgcccaccagggccctgggcatggagggccacaagacgccccttgaaaggacggagagcagctgctcccggccaagccccgatggactccccctgctgccaggcaccgtgctggacctgtccacgggcgtcaactcagctgccagcagcccagaggcgttggcccctggctgggtggtcatcccgccgggctcggtgctgctcaaaccggctgtggtgaactgagcccatcctgcggacagttgtggtgcccccccggcagctcccggcactgcccccgacgaacggaaactcttctgtgaaatagcaataatgtcctactgcccgggcagccccagcccagcccgccgggagcaaggatggtgctaggtcattcatggctggcctcccagcccccgggtggggacctggcctgtcatgcagggagagctgtgctcctgggtgctgaagcctcgctcctgtctgtcccccaccacctggccctcagcttctgagaggctttcccctgcccgacctcctcccgtttccctctcccaccctggcacctccctcacctagtgaccacccatggcaagttgccctctcccagcagagggggtgggtggggtggcatctgccctccctgctagcaccaggctcccccttcctgagaggagcccccagggaccagaggcctgcccttccctcctaggcttacccagcccctgccctgggggctccttggacccctttccctctgaccctgcctccagagggaaagcaagacagatgcaggcccctgcaaagccccaggtagaagcatgccccccaggacaaggcgcctcccactagttaggaggaggcccgctctgcagccgccgtcctcaccccaggccaggcctgcagtaccagacgggatagctggccactccacccctgcaccccagggtctcctccctctaccttttggggcaccctgggagcgtgggaagcaggtccgagggcccctgagctggcaaggggaggtgccaggccagctgtggtgccaagatactgagtgacctgggccctggctcagggagcatgtggggccaggcccagcgccccgtcttcctccttctacccccgctgggcctggcctgggcagcgccccctgcagaggcctttgggtccttggtcctgtaacaggaagggggaggctggctggggacgaccgaccacaggctgggacacagctcctggtctgggggctccaagtgacagcatgcaggggagggggctcccagtcagtgctgtgttgggagctttctggaggctgtggactgaaggccttgagggaagcagtggctggaggagggtgctggacccatgacacgttgcttcctctggcttttccctgctgggccgctttctcagaggcacttccccacccctaacacccagtgggcccccccaggttctgtgccactcagagggaccctggcaggggccagaaccacttaagggtggtgctggagggccttgtgccccagtcccatcccaggacgccctgagggatggacgcagccatgcaccccccatctggggcctctccctgctccctctcccacctggcagctgggagttctggcttctaggcctgccctgtcaccaggcctctgagtggccaggcccttccacctccccatctgtaaaacgaggcagctgcccggacagccttggggtccttagtggccctgcaggtcctctggcagctctgctgaccccaccctctcccggactgcccttctgtcccagaggggtcaccctgacccggcccaccttgccactgggctttggactccagccctgacagggcccagccacactggctctgcccctcgaaggggctatgagcaaggtaggagggagctggtctcctttcttcgggccccacccaggccctgagcaccccccacccctgtgagggccccaggccttaagtccctggcggggtcatgggtttgcgacttgagcagagcggaggaacagggcactggaaggccgacgagctcagcatgcgactcggtgacggaccaggctcggcagggccggtgtactttttgtggttgtcattggtgtgttgttgcacattccaggacgtcagtattttaacaggttctaagtgcctttctatcgtagcttatgttttcctcctcttggctccattgctgttagcatagagttttaaaaaaagagataagctaatgactataacaatatattcctccatgggagaggaagtttataaagaaacaataaaagtgagttgcaaagaaaaaaaaaaaaaaaaaaagggaggaagataa

SEQ ID NO: 8298 - DNA, 318 bp, Homo sapiens
gcgtgtgtgaggtcgatttgaggaccctcctcagctggaaagatatagttctttcacagataaatattttgttccatgatctgtaataacatctgataatatatgagtaattattttcaataaactaaaataaaagtaatctttctttttctttctatcttgaagtagtgggaggaaaaatactatttggaagcgtcatgccctaaaatagtggaaagctttagagggatgggtttcacatcaggaaatctagggaggaaaaatctcttcctctgggatggtgttaggttcttttccgctgaggaggacttagagacc

SEQ ID NO: 8299 - DNA, 1829 bp, Homo sapiens
  misc_feature (3)..(91): n is a, c, g, or t
  misc_feature (936)..(965): n is a, c, g, or t
ctnnnnnnnnnnnnnnnnnnnnnnnnnnnnnnnnnnnnnnnnnnnnnnnnnnnnnnnnnnnnnnnnnnnnnnnnnnnnnnnnnnnnnnnnnatagggcgaaattgggtccggggccacccctcgaatttatattttttttttttctgtggcggttttgcttttatttataatctacaagggatgggagggtttgttttccacatttttaccctcaagttttaaagtttttcccacctcctttttacctacagagctcaaactaaataatgcacttttgaaccaccggtccgcttggagctaacataaataaataccagtgtccaccgatgcagtcctcagatgaacactttctcaattttttttttttttttttttctataaaaagtcaaatgatattttttcaacttttataaagtttgggtggggaggtgaaagtggggagaaggggagtgtcccaccgggtctcggtcgctgctgtcgggtagatagatacggtatacatttctttcctttcgtggcccgagtcctccccacgcgcgggtgtcagcagcctgggccgtgatcccgcctctccctggactcctcccctccccctctccctcctctccctcgctcgccctcccggccgccctcactgataccccagcgccgaggcggtggtcagtctctgtccgtagagggcgtagggggagtagtacggtccggtggcggcgggcaccggcacgggggcgccaggcgtgggaagcgggctcttggagtaggggtggtagcggctgctgagtcccagcgcgtggtgggggctgcgcagcgccagcgtcccagggctgcccggtgcgcccgaggtggggatgtgcatgtggcaagccatggcggccgcggcagcgctggccagagacgacgagctggggtagcccgacagcagtttgtctgtcccnnnnnnnnnnnnnnnnnnnnnnnnnnnnnncagcagctcttcggacgtggcgaagcgcttgtcgcacggcccgttggccgacacccagttgcagatgtgggggagtgggtcgttagggagcataaagccgtaggggtagagggggtggccggccagggagggcgaggggtcgggcttcccgatctgcgaacatgtttgcgccaacagcgccagcgggctcttcttggcatcgagctcgatggggctgaccggcgtggaaggcaggggctgcaggtactcggggtgcaaaatgtggccagttcgtgccgtcagcatcttcagcaccttgattggcaggcggttggcctggcgcagggggtcagaggggggcacggcgtgcacaaaaggcttggtgctgccggccggggacgagcctgggccggggccggagctatttccagagagcgcgctggtccaggcagggtctgcaccgccgcctccgcctccgccgccgccgccgccgctgtgcttactgcttcttagggcagaaagcgagggcgctgtgctcatgacccacccgcgcgcatgggagcagcgggggggagggctccgggaggcgcggggcgggctcggggctgcgcgctcgccccgggagcaggagcagcgggaggaggaggagctggcgcggcggccacgggcgcccagcgcgccttctcggcgcctggagccagacgcgagtaatcctgggtggcccgcagcggagccgtggccgggctagaggagccggctggactgcgggagtgccgggcggctcgcggtgtccgcctcgggctgctcccctgcgctgcgttctcgcggccccgcgccggcgctgcgctctgcgatgcgagccgctgcgtgtccagccctcgtgcc

SEQ ID NO: 8300 - DNA, 1196 bp, Homo sapiens
  misc_feature (31)..(31): n is a, c, g, or t
  misc_feature (1172)..(1172): n is a, c, g, or t
gggaaatggtcctcacccggccactcgccgnttgggggccgccctggcagggaagcggccgccgcggcgcggtgcagcgcagcggcgagaaggagtgcgttatcgtcttgcgctactgctgaatgtccgtcccggaggaggaggagaggcttttgccgctgacccagagatggccccgagcgagcaaattcctactgtccggctgcgcggctaccgtggccgagctaggtacccggctgcccacgcctgggcctcccgggccagtggcacgcgccgcgctgggggagggtgcgcgggcggcttcgcgcccggcagtgcgcatcggagaggtcgccccttccatgcccgcctggcagaggtggcggtggaggccaggcccgcggtgggaggaggagggattgaggtctccacggccttttccttctaatctcttctaatgcttcccttaggcatgtgctgtggtgcttgaatgttgtactttaagaagcttcgcgagctgtcattcctctgtaggaatcattttccttttcatgaggatgacctttttaaaaacgtaatctgttttccatccttactgagatcatctctgtggtttatagtcttacacagccacactgtcattatcttgtgggtccaagttgtggacctaccttgtgggacttccgttattaacctgccactcacagagcatcgactacttgacctctttgagtgtaattcatctatactgtttaccttgcaggattctgagaagtcaataatatatgattgctaaacccaaggcaggacacccattagttgcgacatttttataattcctacaataccagggactgtggatatatatttgaaaagacccagttctgaccttcttacaggctgctggggagacagagaaagacaattataatgtgctacttgttataatgaagatattattaggtgtcataaaagcatagaagagcagttacatctgcctacatgagtaagaaaaaactttaagaggccatctagagtggaatgatgatgcccttgaatgagcaagtagcgtttattccaaggattttgtgagtagtatactcatgtgtttcctgtgaagccttaactgtgtattttaagattacccttacattttcttgcctgttacaaaaaaataaaaagaacagttctgntgcgttaaaaaaaaaaaaaaaaaa

SEQ ID NO: 8301 - DNA, 6810 bp, Homo sapiens
  misc_feature (330)..(370): n is a, c, g, or t
  misc_feature (2687)..(2699): n is a, c, g, or t
gccagaatcagccctattgtcggggactgccggatcctcaggacatcattagccaaagccttcaatcgccttctcagcaagctgccaaatccttttatgatcgaatcagtttccttataggatctgatagcacccatgttatacctggagaaagtcctttcaataagagccttgcatctgtcatcagaggccaagtactgactgctgatggaactccacttattggagtaaatgtctcgtttttccattacccagaatatggatatactattacccgccaggacggaatgtttgacttggtggcaaatggtggggcctctctaactttgnnnnnnnnnnnnnnnnnnnnnnnnnnnnnnnnnnnnnnnnngtggattccatggaatgtcttttatgtgatggataccctagtcatgaagaaagaagagaatgacattcccagctgtgatctgagtggattcgtgaggccaaatcccatcattgtgtcatcacctttatccacctttttcagatcttctcctgaagacagtcccatcattcccgaaacacaggtactccacgaggaaactacaattccaggaacagatttgaaactctcctacttgagttccagagctgcagggtataagtcagttctcaagatcaccatgacccagtctattattccatttaatttaatgaaggttcatcttatggtagctgtagtaggaagactcttccaaaagtggtttcctgcctcaccaaacttggcctatactttcatatgggataaaacagatgcatataatcagaaagtctatggtctatctgaagctgttgtgtcagttggatatgagtatgagtcgtgtttggacctgactctgtgggaaaagaggactgccattctgcagggctatgaattggatgcgtccaacatgggtggctggacattagataaacatcacgtgctggatgtacagaacggtatactgtacaagggaaacggggaaaaccagttcatctcccagcagcctccagtcgtgagtagcatcatgggcaatgggcgaaggcgcagcatttcctgccccagttgcaatggtcaagctgatggtaacaagttactggccccagtggcgctagcttgtgggatcgatggcagtctgtacgtaggcgatttcaactacgtgcggcggatattcccttctggaaatgtaacaagtgtcttagaactaagaaataaagattttagacatagcagcaacccagctcatagatactaccttgcaacggatccagtcacgggagatctgtacgtttctgacacaaacacccgcagaatttatcgcccaaagtcacttacgggggcaaaagacttgactaaaaatgcagaagtcgtcgcagggacaggggagcaatgccttccgtttgacgaggcgagatgtggggatggagggaaggccgtggaagccacactcatgagtcccaaaggaatggcagttgataagaatggattaatctactttgttgatggaaccatgattaggaaagttgaccaaaatggaatcatatcaactcttctgggctctaacgatttgacttcagccagacctttaacttgtgacaccagcatgcacatcagccaggtacgtctggaatggcccactgacctagccattaaccctatggataactccatttatgtcctggataataatgtagttttacagatcactgaaaatcgtcaagttcgcattgctgctggacggcccatgcactgtcaggttcccggagtggaatatcctgtggggaagcacgcggtgcagacaacactggaatcagccactgccattgctgtgtcctacagtggggtcctgtacattactgaaactgatgagaagaaaattaaccggataaggcaggtcacaacagatggagaaatctccttagtggccggaataccttcagagtgtgactgcaaaaatgatgccaactgtgactgttaccagagtggagatggctacgccaaggatgccaaactcagtgccccatcctccctggctgcttctccagatggtacactgtatattgcagatctagggaatatccggatccgggctgtgtcaaagaataagcctttacttaactctatgaacttctatgaagttgcgtctccaactgatcaagaactctacatctttgacatcaatggtactcaccaatatactgtaagtttagtcactggtgattacctttacaattttagctacagcaatgacaatgatattactgctgtgacagacagcaatggcaacacccttagaattagacgggacccaaatcgcatgccagttcgagtggtgtctcctgataaccaagtgatatggttgacaataggaacaaatggatgtttgaaaagcatgactgctcaaggactggaattagttttgtttacttaccatggcaatagtggccttttagccactaaaagtgatgaaactggatggacaacgttttttgactatgacagtgaaggtcgtctgacaaatgttacgtttccaactggagtggtcacaaacctgcatggggacatggacaaggctatcacagtggacattgagtcatctagccgagaagaagatgtcagcatcacttcaaatctgtcctcgatcgattctttctacaccatggttcaagatcagttaagaaannnnnnnnnnnnnacttatgacggctccctcagaattatctacgccagtggcctggactcacactaccaaacagagccgcacgttctggctggcaccgctaatccgacggttgccaaaagaaacatgactttgcctggcgagaacggtcaaaacttggtggaatggagattccgaaaagagcaagcccaagggaaagtcaatgtctttggccgcaagctcagggttaatggcagaaacctcctttcagttgactttgatcgaacaacaaagacagaaaagatctatgacgaccaccgtaaatttctactgaggatcgcctacgacacgtctgggcacccgactctctggctgccaagcagcaagctgatggccgtcaatgtcacctattcatccacaggtcaaattgccagcatccagcgaggcaccactagcgagaaagtagattatgacggacaggggaggatcgtgtctcgggtctttgctgatggtaaaacatggagttacacatatttagaaaagtccatggttcttctgcttcatagccagcggcagtacatcttcgaatacgatatgtgggaccgcctgtctgccatcaccatgcccagtgtggctcgccacaccatgcagaccatccgatccattggctactaccgcaacatatacaaccccccggaaagcaacgcctccatcatcacggactacaacgaggaagggctgcttctacaaacagctttcttgggtacaagtcggagggtcttattcaaatacagaaggcagactaggctctcagaaattttatatgatagcacaagagtcagttttacctatgatgaaacagcaggagtcctaaagacagtaaacctccagagtgatggttttatttgcaccattagatacaggcaaattggtcccctgattgacaggcagattttccgctttagtgaagatgggatggtaaatgcaagatttgactatagctatgacaacagctttcgagtgaccagcatgcagggtgtgatcaatgaaacgccactgcctattgatctgtatcagtttgatgacatttctggcaaagttgagcagtttggaaagtttggagttatatattatgatattaaccagatcatttctacagctgtaatgacctatacgaagcactttgatgctcatggccgtatcaaggagattcaatatgagatattcaggtcgctcatgtactggattacaattcagtatgataacatgggtcgggtaaccaagagagagattaaaatagggccctttgccaacaccaccaaatatgcttatgaatatgatgttgatggacagctccaaacagtttacctcaatgaaaagataatgtggcggtacaactacgatctgaatggaaacctccatttactgaacccaagtaacagtgcgcgtctgacaccccttcgctatgacctgcgagacagaatcactcgactgggtgatgttcaatatcggttggatgaagatggtttcctacgtcaaaggggcacggaaatctttgaatatagctccaaggggcttctaactcgagtttacagtaaaggcagtggctggacagtgatctaccgttatgacggcctgggaaggcgtgtttctagcaaaaccagtctaggacagcacctgcagtttttttatgctgacttaacttatcccactaggattactcatgtctacaaccattcgagttcagaaattacctccctgtattatgatctccaaggacatctttttgccatggaaatcagcagtggggatgaattctatattgcatcggataacacagggacaccactggctgtgttcagtagcaatgggcttatgctgaaacagattcagtacactgcatatggggaaatctattttgactctaatattgactttcaactggtaattggatttcatggtggcctgtatgacccactcaccaaattaatccactttggagaaagagattatgacattttggcaggacggtggacaacacctgacatagaaatctggaaaagaattgggaaggacccagctccttttaacttgtacatgtttaggaataacaaccctgcaagcaaaatccatgacgtgaaagattacatcacagatgttaacagctggctggtgacatttggtttccatctgcacaatgctattcctggattccctgttcccaaatttgatttaacagaaccttcttacgaacttgtgaagagtcagcagtgggatgatataccgcccatcttcggagtccagcagcaagtggcgcggcaggccaaggccttcctgtcgctggggaagatggccgaggtgcaggtgagccggcgccgggccggcggcgcgcagtcctggctgtggttcgccacggtcaagtcgctgatcggcaagggcgtcatgctggccgtcagccagggccgcgtgcagaccaacgtgctcaacatcgccaacgaggactgcatcaaggtggcggccgtgctcaacaaccttctaacctggagaaccctgcacttcaccatcgagggcaaggacacgcactacttcatcaagaccaccacgcccgagagcgacctgggcacgctgcggttgaccagcggccgcaaggcgctggagaacggcatcaacgtgacggtgtcgcagtccaccacggtggtgaacggcaggacgcgcaggttcgcggacgtggagatgcagttcggcgcgctggcgctgcacgtgcgctacggcatgaccctggacgaggagaaggcgcgcatcctggagcaggcgcggcagcgcgcgctcgcccgggcctgggcgcgcgagcagcagcgcgtgcgcgacggcgaggagggcgcgcgcctctggacggagggcgagaagcggcagctgctgagcgccggcaaggtgcagggctacgacgggtactacgtactctcggtggagcagtaccccgagctggccgacagcgccaacaacatccagttcctgcggcagagcgagatcggcaggaggtaacgcccgggccgcgcccgccgagccgctcacgccctgcccacattgtcctgtggcacaacccgagtgggactctccaacgcccaagagccttcctcccgggggaatgagactgctgttacgacccacacccacaccgcgaaaacaaggaccgcttttttccgaatgaccttaaaggtgatcggctttaacgaatatgtttacatatgcatagcgctgcactcagtcggactgaacgtagccagaggaaaaaaaaatcatcaaggacaaaggcctcgacctgttgcgctgggccgtctgttccttctaggcactgtatttaactaactttaaaaaagaaaaaaaaatgtatacagtgtttccaaatagtcccgaattgtcgacctttgcttacaagaagtagtctgtctgcataggatgtgatagctatctctgttcattttacaatgtggggcaaagttactgtttctagacaacccaactgctttccctgtgcagctttgtagaaggacattggcacagtgaccttctgcggcgggatttattaatggattttacaatgctaacgtggtttcccttcggggaaaaaactggcaactagaatccttgtcactgataagcaaaggaaatcctgatttttttgtaaattatgtgagacaagttgtttatggatttttatatgaattacaatttactgtacatcaaatcttagtctcagaggagttaatttatgtaaagtgtttaaaaatttatacttaaaaataaaatgataaaaacgtgaaagaaaaaaagcacaaaaaaaaatgaacatagacaatgttaagaggccgccattcaggcgtccactagaagcatgatgaaaaaaaaatatgatagaggacacgagagccaataaaaagtataaaaaaaaaagacatgtggcaccaagagatactagtctggacaagaatagagaaactcgcacggtgccaatgcgaacaaaagacggacacaggagacaactagcaccagcagacaagtataaaaaaaaactgcctaccgcgaggtggcaggaaaaaagctgaaaagctgtagtacctacaagatcaacaaggcatcacgatgaagg

SEQ ID NO: 8302 - DNA, 2838 bp, Homo sapiens
  misc_feature (2)..(2): n is a, c, g, or t
  misc_feature (5)..(5): n is a, c, g, or t
  misc_feature (7)..(9): n is a, c, g, or t
  misc_feature (11)..(11): n is a, c, g, or t
  misc_feature (15)..(17): n is a, c, g, or t
  misc_feature (23)..(23): n is a, c, g, or t
  misc_feature (30)..(30): n is a, c, g, or t
  misc_feature (32)..(34): n is a, c, g, or t
  misc_feature (39)..(40): n is a, c, g, or t
  misc_feature (43)..(43): n is a, c, g, or t
  misc_feature (48)..(49): n is a, c, g, or t
  misc_feature (52)..(53): n is a, c, g, or t
  misc_feature (57)..(57): n is a, c, g, or t
  misc_feature (63)..(63): n is a, c, g, or t
  misc_feature (65)..(72): n is a, c, g, or t
  misc_feature (76)..(78): n is a, c, g, or t
  misc_feature (87)..(92): n is a, c, g, or t
  misc_feature (99)..(100): n is a, c, g, or t
  misc_feature (114)..(116): n is a, c, g, or t
  misc_feature (133)..(133): n is a, c, g, or t
  misc_feature (143)..(143): n is a, c, g, or t
  misc_feature (147)..(148): n is a, c, g, or t
  misc_feature (171)..(171): n is a, c, g, or t
  misc_feature (177)..(178): n is a, c, g, or t
  misc_feature (188)..(189): n is a, c, g, or t
  misc_feature (193)..(194): n is a, c, g, or t
  misc_feature (217)..(217): n is a, c, g, or t
anggncnnncnaaannngtttgnaaggccnannngggtnnggnccccnnccnncaantacccnannnnnnnngccnnnaaaaggggnnnnnntgtcctnnaagggccgaataannnggggaaccccccagggntttcccaagncccnngccgtggaaaaccgacgggccantgaaanntgtaaaacgnncccnnccaaaggcgaaatgggaccgggnccccccccggtggttttccccttttttgatttttttattttttttttttttttttttttttagagcttctccatttttattacacaaaattgttaagttttcagcagtagggcttctcaaaacaccagctgcaggctattacctgaaaaagacaaggcagttatattaggttctcgtgtaaatatgaatatacaatcaagtcaagctcctgacaaattatacatcaaggatgtatatagttcaaagatattgtgctgttacctcccacctccccaaaactccaagaactagcacctgcagagaaaaggagaaatacagaaagagtcctgaagacagattagtagtcaaagcaaagacgccgcagggatttgaaccccgtcctggaaaccaggagtgccaaccaccagcatcttttgctttttttttttttaagctagaaaaaggccaaaaagcaaaacctgagaaaacaatacgtgttgttttctcaggaaaagaaaaaccttcatgaccctactgaagagcattggagatcagcttccgctaagatgctagcttggccaagtctgttatgttcacctgaaaaagtcttagcagagaatttttgcattcccacccaaaagccctctcagccactcaaatgcctatcttctccagtctacaagttacatgttcccacccagcattacagttcttgaacatgttatttctccacttactggtttaagttggttttagtcactggataagtattataatagagctacttagctgtggttttaatacccttctgttaacaatttgcaggcaaattaatggccttttctaacatagttcaacccaccaaagacctcgacaccatcgttaccttgaaaccgattatggatcatgcccacaaggatccaagctactggctgcatcgaggtgaggggtgaagggtctgtgctagatcaaaaggcacggggtggcgatgtggcagagaagttgcttgtggggagaccttgcttttaacaggcttctggaaaagctagggaaaagtggttgcccgctttccccctttccctccccttcaagcaccgcttgagatttgggctttattattaagagctgctataaaaacagcttgcttaaatgttaagagaagcccaggggtacttcaagcattccttcggatgcttcactccagaaagagggagttgaggcaagtcctcattactaataaaaatcaggtgaggctgacacttctcttgaccttaggataatagcgctttgttgtctctcctgccacaggaaggctccatggttgtcctactttaagccttcggtgcctttagtgaggggtacctgaaaaatcttaaaaaaaggcttatcgccgacctcacccctccacccccacgccaacacagtttgctcacatgccagttactccagcataaagctgaaatctattcaatactattgtcccataactgatctgactttgtatgtaaatacagaaaaagcttgttcacctgttttcctcattttgtccactggtgaattcaactggaaggctccttctatagtctgaagaataccactctgaaagaactagtggttcgccatccccacatttaaaatggaatgtttggtttatttaaagtaaataggctattttttcttactgggtctggcttctctggcccttcgcatacgtgtgtctgctgagtgttcctgcatgtaagaattaagaccaagggaggggagagagaaacccacacataaacaatgcactaaagatcactgaactgtttaaacatttccacttgccagtttaatttcttgaagactgttgcttgtttggaatgtttcttgtcactgattttaaggttgcatctggaaaagactaaaggcttcagtcccctcccaccaccagaaatgaacaaaaagcattttacctaaaaatacaccagcaaaatgtactcagcttcaatcacaaatacgactgcttaaaactgcagaaatttcctcaacactcagcctttatcactcagctggattttttccttcaacaatcactactccaagcattggggaacacaacttttaatcatactccagtcgtttcacaatgcattctaatagcagcgggatcagaacagtactgcatttacttgccaacagaacagacagacctgaagtcaagacaactgcattctctgtgaagtctgtaaaaaaaaaaaaagctacaacaagtaagccccaccccctcctcccatccctccaaattccaggaaaaaaattttgagtatgctgataaactcactgcaaggtctcatacactcactagaacagaaggaagagccaagcactcatatgcaattcaaaatcctgaatggcttcatgaaggatgaaatgcctctgcaaaggaaaattctttaaaaccccacaggcaccccctcccttccctatataaggtcaatagtgtaaaacattgcctaccactctaagattgtaagcatttaaagttaacatgcaaactttggaaatgtgaaaaagtattactctaatcactgtccatttatagactcctgactttctggaaataaaatgtgtaattaccttttactctggacgctactcgc

SEQ ID NO: 8303 - DNA, 2914 bp, Homo sapiens; identical to SEQ ID NO: 7441
  misc_feature (933)..(951): n is a, c, g, or t
  misc_feature (1282)..(1344): n is a, c, g, or t
  misc_feature (1908)..(1934): n is a, c, g, or t

SEQ ID NO: 8304 - DNA, 5385 bp, Homo sapiens
  misc_feature (899)..(938): n is a, c, g, or t
  misc_feature (1673)..(1688): n is a, c, g, or t
  misc_feature (5050)..(5078): n is a, c, g, or t
  misc_feature (5123)..(5123): n is a, c, g, or t
cacgaggcagcctcaccaacccctttcctgcggtggagcctgccgtggtgaagttcgtctgcgccccaccgtccaggctcaccctcgcgcctgtctacaccaacccccagctggacatgtcctgtccgctgctgcagcagaacaagcaggtggtcccagtgtccagccaccgcaaccccctgctggacctggctgcttacgaccaggagggccgccggttcgacaacttcagctctctgagcatccagtgggagtccaccaggccagtgttggccagcatcgagcctgagctgcccatgcagctggtgtcccaggacgatgagagtggccaaaagaagctgcacggtttgcaggccattttggttcacgaggcatcaggaaccacagccatcactgccactgccactggctaccaggagtcccacctcagctctgccagaacaaagcagccgcatgaccctctggtgcctctgtcggcctccatagagctcatcctggtggaggacgtgagggtgagcccagaagaggtgaccatctacaaccaccctggcatccaggcagagctccgcatcagggaaggctcaggttacttcttcctcaacaccagcaccgcagatgttgtcaaggtggcctaccaggaggccaggggtgtcgccatggtgcaccctttgctcccgggctcatccaccatcatgatccatgacttgtgcctcgtcttcccggccccagccaaggctgtcgtttacgtgtcggacattcaggagctgtacatccgtgtggttgacaaggtggagattgggaagacagtgaaggcatacgtccgcgtgctggacttgcacaagaagcccttccttgccaaatacttcccctttatggacctgaagctccgagcagcctcnnnnnnnnnnnnnnnnnnnnnnnnnnnnnnnnnnnnnnnncaactacaccatcacattcctcatccgcggtgtggccatcggccagaccagtctaactgcaagtgtgaccaataaagctggacagagaatcaactcagccccacaacagattgaagtctttcccccgttcaggctgatgcccaggaaggtgacactgcttatcggggccacgatgcaggtcacctccgagggcggcccccagcctcagtccaacatccttttctccatcagcaatgagagcgttgcgctggtgagcgctgctgggctggtacagggcctcgccatcgggaacggcactgtgtctgggctcgtgcaggcagtggatgcagagaccggcaaggtggtcatcatctctcaggacctcgtgcaggtggaagtgctgctgctaagggccgtgaggatccgcgcccccatcatgcggatgaggacgggcacccagatgcccatctatgtcaccggcatcaccaaccaccagaaccctttctcctttggcaatgccgtgccaggcctgaccttccactggtctgtcaccaagcgggacgtcctggacctccgagggcggcaccacgaggcgtcgatccgactcccgtcacagtacaactttgccatgaacgtgctcggccgggtaaaaggccggaccgggctgagggtggtggtcaaggctgtggaccccacatcggggcagctgtatggcctggccagagaactctcggatgagatccaagtccaggtgtnnnnnnnnnnnnnnnntgctcaaccctgaaatagaagcagaacaaatattaatgtcgcccaactcatatataaagctgcagacaaacagggatggtgcagcctctctgagctaccgcgtcctggatggacccgaaaaggttccagttgtgcatgttgatgagaaaggctttctagcatcagggtctatgatcgggacatccaccatcgaagtgattgcacaagagccctttggggccaaccaaaccatcattgttgctgtaaaggtatcccctgtttcctacctgagggtttccatgagccctgtcctgcacacccagaacaaggaggccctggtggccgtgcctttgggaatgaccgtgaccttcactgtccacttccacgacaactctggagatgtcttccatgctcacagttcggtcctcaactttgccactaacagagacgactttgtgcagatcgggaagggccccaccaacaacacctgtgttgtccgcacagtcagcgtgggcctgacactgctccgtgtgtgggacgcagagcacccgggcctctcggacttcatgcccctgcctgtcctacaggccatctccccagagctgtctggggccatggtggtgggggacgtgctctgtctggccactgttctgaccagcctggaaggcctctcaggaacctggagctcctcagccaacagcatcctccacatcgaccccaagacgggtgtggctgtggcccgggccgtgggatccgtgacggtttactatgaggtcgctgggcacctgaggacctacaaggaggtggtggtcagcgtccctcagaggatcatggcccgtcacctccaccccatccagacaagcttccaggaggctacagcctccaaagtgattgttgccgtgggagacagaagctctaacctgagaggcgagtgcacccccacccagagggaagtcatccaggccttgcacccagagaccctcatcagctgccagtcccagttcaagccggccgtctttgatttcccatctcaagatgtgttcaccgtggagccacagtttgacactgctctcggccagtacttctgctcaatcacaatgcacaggctgacggacaagcagcggaagcacctgagcatgaagaagacagctctggtggtcagtgcctccctctccagcagccacttctccacagagcaggtgggggccgaggtgcccttcagcccaggtctcttcgccgaccaggctgaaatccttttgagcaaccactacaccagttccgagatcagggtctttggtgccccggaggttctggagaacttggaggtgaaatccgggtccccggccgtgctggcattcgcaaaggagaagtcttttgggtggcccagcttcatcacatacacggtcggcgtctcggaccccgcggctggcagccaagggcctctgtccactaccctgaccttctccagccccgtgaccaaccaagccattgccatcccagtgacagtggcttttgtggtggatcgccgtgggcccggtccttatggagccagcctcttccagcacttcctggattcctaccaggtcatgttcttcacgctcttcgccctgttggctgggacagcggtcatgatcatagcctaccacactgtctgcacgccccgggatcttgctgtgcctgcagccctcacgcctcgagccagccctggacacagcccccactatttcgctgcctcatcacccacatctcccaatgcattgcctcctgctcgcaaagccagccctccctcagggctgtggagcccagcctatgcctcccactaggccgcgtgaaggttcccggaggatgggtctcagccgagcctcgtgcacccccaagatggaacatccctgctgcattcacactggaacaagcccctccagatgagtgccccggccccaggccagcttcactgccgtctcttcacacagagctgtagtttcggctctgcccattagctcattttatgtaggagttttaaatgtgtgtttttttcctttcaagtcttacaaagctaagactttttggctcattcctttttgcatggttgtctagggtttctggacaatgtgctgttgcatttttattttcctagccttgctaaaatctttcccttctcaagactttgagcagttagaagtgctctttagaagttgtctgtgggtgatgttactgtagtggtctcagggaaaggattgtccagttactttagggggtttttggtggggtttttccccctgtgaaaacttactttgcccctagtctggctgctgctaggacttctgaggagcaatgggacatgagtgtccctgtatctgcgccactgccgcaagggaagcctcaggaaccagcacctggaggccaggatagccaagccctgggtgagcgagaggctggagaacacaggagctcacccagggctgctgcccaaccatgggccactgtgaacagacttcagtcctctgtttttgtttcataagccgttgagacatctgatggacttggcttaggccctgctgggacatcccacgtgtgatccctttcactccatcaggacaccaggactgtccttaggaaaatgtccttgagatggcagcaggagtcatattttctgtgtgtgtgtttcggaaagccgctgtgtcctgcctcagcacaaagacccagtgtcatttgctcctcctgttcctgtgccactccagaacctcagcagatctgagccaccgcctgccagtgtgagaggcggccactttcatggcagctcatcaggcgcagggccccagacagcttcccagccggccctagagcccggcctgggccaatgatggagggcggccaccagcccagggcctgcccatccagaagggactccccagggcctgggggaggagacccttggaaaagtcctctcttcccagctcctgattctggatctgagattctcagatcacaggcccctgtgctccaggccgaggctgggctaccctcagggagatccagagactcatgcccatggccatccatgcgtggacgctgtgtggagagtccaggatgacgggatcccgcacaagctcccttcagtccttcagggctgggccatgtggttgatttttctaaagctggagaaaggaagaattgtgccttgcatattacttgagcttaaactgacaacctggatgtaaataggagcctttctactggtttatttaataaagttctatgtgattttttttttaaaaaaaaaaaaaatgcgttttgcgaacccccccagaggcttctttttggtccggggggccgtggaaaaaacaggggtaattggaaaatggggcacaatgtggcccacaaannnnnnnnnnnnnnnnnnnnnnnnnnnnnttctggagaaaaaaaggggggaaaaactcttgcccgggctctccnccttaatcaggggaaagcgggtattaagatttttcgagaaaaccccccggtcttaccccctgcacttttatttggaatcccgcgccgtgttacttccccccgggggtatctctacagcccccgcccccacaattatgaacgcgcgcgcttttgcccctctcgtgagcgagaccacacatggggggagacccttttcttacgaagaaatcccttttttttgtctgtgcccgcgcaataatacacacatttcgcgtgtgggtgg

SEQ ID NO: 8305 - DNA, 764 bp, Homo sapiens
acacctttgggaagctgaagcaggtagatcacttgaggtcaggagttccagaccagcctggcccacatggtaagacccccgtctctactgaagatacgtaaattagctgggtgtggttgtgcacgcctgtaattccggctactcaggaggtggaggcaggagaactgcttgtacacgggaggcggaagttgcagtgagccaagatcgcggcactgcactccatccggcctatgagactatttctaaatataaaaggagcaatttattatttttccctctcaaaagaatttcagatattctggttaaagtctcaccccatattttctcttcccgtttttgagggaggcaggaaaacaggattcagtatgggcatagcagaagactgaaatctcattccaagctcatagttaaaaagaagtctgcatatgaacccatcagtagagaagtggctaagtggttgtgggattcataattaaccatgactttctctcttaggctgtatttttgtctcgtcccagctcttctgcctgttactgacctcacctgctacctgtttcttccagcttcctttgctctaacttccagctcatctctcatcttgttattttattcatcaggatatctcctcaccttgcttacgaacaggaatttcagcaacatcaccccagagccctgacttaaaatgtgaggctctttttcatgattttttttccccttcctcgtcttcagaacttaactctaatgccagccgtcgtaggcaggtc

SEQ ID NO: 8306 - DNA, 1235 bp, Homo sapiens
  misc_feature (298)..(317): n is a, c, g, or t
tcttcgatatcggcgacccacgcgtccgctttccgtccgcgcggcggacgtgggtgagggcgcggccgtaagagagcgggacgcttggtgcccggcgcgtggtgggggtccccggcgcctgcccccacggcacccaagaaggcctggccagggtaccctccgcggagcccgggggtggggggcgcggctgagctacgccgtgggccacttcctcaacgacctgtgcgcgtccatgtggttcacctacctgctgctctacctgcactcggtgcgcgcctacagctcccgcggcgcgggnnnnnnnnnnnnnnnnnnnnaggtggccgacgggctgtgcacaccgctcgtgggctacgaggccgaccgcgccgccagctgctgcgcccgctacggcccgcgcaaggcctggcacctggtcggcaccgtctgcgtcctgctgtccttccccttcatcttcagcccctgcctgggctgtggggcggccacgcccgagtgggctgccctcctctactacggcccgttcatcgtgatcttccagtttggctgggcctccacacagatctcccacctcagcctcatcccggagctcgtcaccaacgaccatgagaaggtggagctcacggcactcaggtatgcgttcaccgtggtggccaaaatcaccgtctacggcgcccccctggctcctgcttggaccttgcagggggttcgtcgcgggtggatgcccacccacagacatcattatccagcgacccatctgggggggcacagtgatcgtgccctgtgttcctgtaacctgcgcatccttacctggctgccccgccgtctcgccctttgttgttatcccacccttgcccttatccccccctcgtccttcaccgcgccttcccgtcttccctcccccttattctcttgcacgctacccaccacctccatcttgctctcctccccgtcgtccccctaccctcactactccgcccttatctcatccatcttatgtgcatccgactaacacctactagccttattcactcattcacgtaagataccctatcccaccgattaatcctcttctgtgccgccctctccacaccatacctcctgatctactatagcgtgcgtttgccttcattaccccccgtttcccccccttccagccgtaacgtcgactcgcctcagacgcgccggacgctcatgcaacccaccctggtctctgatgacgtgccttcgtctatccc

SEQ ID NO: 8307 - DNA, 570 bp, Homo sapiens
aaattaattaactgggtatggtggcacatgcctgtagtcccagctactcaggaggctgaggtgggaggatgacttgagcccaggagtttgaggctgcaaggagctatgatcatgccagtgcatcccagctctaggtgagacagtgagatccggtctccaaaataaatcaatcaatcaaataaagaccaaagtcaaaccgcacatcaggatctctcacacccttccaattttgccatctaccagcacttagctaaacccatctcccatctcttccaccatgaattcactctttcaaaaaggctaatgtcttcttactcacccttgcctctaagcctttgctatcaccatttcccccaagctggagggccctccctctccctttacccctcttccactacctcccacccctactttttccagaaagccatttcctctcttttttctgattgatccttccctctcacccaggattagatgctggaaatgaccacttctggagggcagggaacaagcccttaatctgcataatgagtgttcaataaacagttgtcaaactttgaaaaaaaaaaa

SEQ ID NO: 8308 - DNA, 1431 bp, Homo sapiens
  misc_feature (1320)..(1360): n is a, c, g, or t
ggcacgaggcccgggtagctgctgcagcctacgctgcctcggccactgcctgccgcgtgcggagccggagcccgagcctgagtggcgccgggcccgacgtggggctcctgggccgcggcggcgggcgggcgatgctccagaggcctgaccagccatggaggccgaggcaggcggcctggaggagctgacggacgaggagatggcggcgctaggcaaggaagagctagtgcggcgcctgcggcgggaggaggcggcgcgcctggcggcactggtgcagcgcggccgcctcatgcaggaggtgaatcggcagctgcagggccacctgggcgagatccgcgagctcaagcagctcaaccggcgtctgcaggcagagaaccgtgagctgcgcgacctctgctgcttcctggactcggagcgccagcgcgggcggcgcgccgcacgccagtggcagctcttcgggacccaagcatcccgggccgtgcgcgaggacctgggcggctgttggcagaagctggccgagctggagggccgccaggaggagctgctgcgggagaacctagcgcttaaggagctctgcctggcgctgggcgaagaatggggcccccgcggcggccccagcggcgccgggggatcaggagccgggccagcacccgagcttgccttgcccccgtgcgggccccgcgacctaggcgatggaagctccagcactggcagcgtgggcagtccggatcagttgcccctggcctgttcccccgatgattgaaggcactgcttcctccacgccgacgcccgcccggattgctccccgagccccgggaccgctgtggacctcgggacctggacgccgtcctggctgcgcaggaggggccgctggcatggactaagaaatcctgacaccaagaagggcccctcgctcttgctggcagggcagcagggggactgaaggctggagcggagggacttgctgggggttggattgggggtaataaacccggacggaagcggaaaaaaaaaaaaaaaaaaaaaaaaaaaaaaaaaaaaaaaaaaaaaacatggacagaagcgacgaaacccccgagggttcttttgccgggggggcgggagaaaaaaggtgaattgaagtggcccccatgggcactaagttggttttccggaccccactttttctttgtaacaaaagggggaaaatttggccccggtcccccctaaaagggggggcccaaataaattctccgaaaaggccagggttccccccggcaattatatgaaaaacggggtggcgcaaccccgcggagaaatttctaccccccccaaaaatgnnnnnnnnnnnnnnnnnnnnnnnnnnnnnnnnnnnnnnnnnttcttctaggaaaaccctgttttttttttcgcgggagaaaactttccgtgcgcggggtggaaacaagaaaa

SEQ ID NO: 8309 - DNA, 284 bp, Homo sapiens
atcttgacggcttgaatgtttgctgcctctgggagaagtagagtaggagagggtataagaaggacgctgacaccaggctttcctgtagtacttattcacagagccaggtgcttgagtactggtggtggtgtggggggattgtccattgatcctccttgacttttgccataagagaggccttatttatgggctactggctttctctcatttgttatgtgtttttttttcttttcatgcagtgatcagaatataatgtccaaacattcaagccgtcagggatccgc

SEQ ID NO: 8310 - DNA, 635 bp, Homo sapiens
aattcgtagacacagaatacagattagtggttgccaggccctggagggagaggaagatggggataaactgcttaatgggtaagaagttttactttggagtgatgggaatgttttaaaaatagaggtggtggttgcataacattatagatgtactaaatgccgctgttcgttttagaatgattttatgttatgttaatttcacctcagtaaatgtttaaatcaaatgaaaacaacttgctgtaggagatgaagaagtaaggagcaccccatctgagtgtgagatgcctctggggtttgtccaacacacagcccagccgaggctctgagggaggtcgtggtgcagccactgatgcatcacagccacacgtggcattcacacaagcatggtttatgacttgggtaattatccaagctgttccacaaacctggaggtcactcatcgtaaaagtctttaatcataaagatgtgtttcctcttcacagaaggtgtgttttgttctggaagggctcagagtccttgtccttttttccaattgggtgtcagagtacagtgcaagcaactggtatttgctttcaaatctttttcttcaccttttaggcccaattttactgcttttttaaaagatgtccttgccg

SEQ ID NO: 8311 - DNA, 858 bp, Homo sapiens
tggcttgtgctgtctgatcttgaggatcctccggtgtaacggatcaggtttcagtgtggagatccagagataggcctgcctgccttactaaaaggaaggagtagtttagaggaaatgggcaggagtaagctgagaatgagttgtcagaagtcacaagcccttagagaagggtggcaagaaattagcccactgataagaaaaaggctgaaacaccaatgtgctgccctctaaagtgagaggaacactcagagccagctacaggcaggaggagccctgaggaagaagttgggaatgccgtgaagactatgtgggccatctctccagtcaagggagaaaaggagcccaaaaggggacggcaagccagaagaggcatcggctctgcacaattgtcaccagagtaacttctaaaatttaaaattgggattcattccctagggtgtacagacgggctacaggtgtctgaaaatgttttgctgtcagaagcaaaattgtttgtgtctaggtatttttctggggagagtctctatagctttcatcagattctccaagggaggtctttgcaccataaagagctccaccgagactcaccaccgacatacttggaggaagatattataattatagaggacacaacccatttactgaataatctctcagataagctgatcatcatctaacagagaagaactactgagggagctgaactagtgctgctatgggaaatgacttgattctttcacccattcgattaataaatctttattgagcactgtttagattctaggatatggtactgcacaaaaaagagaaaaacaattcctgccaagtagattgaagctttcattccagtgggtgcag

SEQ ID NO: 8312 - DNA, 644 bp, Homo sapiens
agatccaaatgaatccaagattaaatataaacacctaatccataaatataactgatgaaaacataatcattttagctcactgagcttgcttgaaagataaaaaacataaaaatgaagataatgattttgatcacctaagattgtaaagcttttaacaatgttaaaaaacaaggaaaaatactcataacctataacaatttattttcctaatatacaaaaagttcatttgttgagtgtttgttatgtgttaagcactacatacaatatcccatttaattctcacaacaatcctgacaggaaagtactaattaacatcgtaattttacagatgaaataactcagagcttaagtaaggccttcccagttttgccacagcatactagtatggtagaaagggttataagtgtgccaagatgttgatcctttttaaccctttagcctcaagtagtctcttgtataaatagttaacagtttgtgtgccaccatgtgaaagaagtttagcaagctgatagatacgtaataaaatatccttgtttttagaaaatattcaccaaagtattaaaagatataaactataaaaggcatcaggtatgtaacccactctcaaatggttcagaaaaaaatgtgtgtcaggggagaagagc

SEQ ID NO: 8313 - DNA, 3101 bp, Homo sapiens; identical to SEQ ID NO: 5270

SEQ ID NO: 8314 - DNA, 1114 bp, Homo sapiens
cacaaaacagctcctgtgggttcagattgcacacccgccatggagagactgtgcccaataaatggccactctatttgctgtggatgcagcatatggatactggccaagcctgacttatcaacttagtattctcaagatctaacttttgattccagcagctagttaactattaattcaggctcttgggaaatactggaaagtgatatgttaggaaatggggacaggggttacctaggaatctaacaagacgccccctcccactctccagtgatgatctggtacaggccagattcaacaggacagctccaatctggtctctctgggagcgtgaagtgcccacagaccagcaacgcttgatcaatcagggctaatggaaataaagacaccaggtgtgccaatgagggcacaggctattttccacttggcttgtctttatcacggccctaaaagtttctctctgctccctggatggcctacaaatgtggacatgatccctcgaatcctgggctaaagcagaatcacaaaaatcacaaacccgatcttccagaaatgaagcagaggcacatttcactcgagggacagaagcaaaatgccaaacccagagcctgctccgtagctccccaggaaaggtagagactgtgtggggccattggcagcctgagtggtacccatggggtctcctctgcgcacagcaatccatgggggtcctcaaagagatgctgtggtggcagtttccagctgtttctcttgagaccatctgtcccaaatcacagcccaaggtcataaatcaaagaccacttcctttctgacatgctctttcttggggaggtgtccacacgtataggagagtggtctagaggaagaaaggttcatggaatgtgggacgcatgggataggaatgtaaccaagaagagagaatgaagacgagtttttaattattagaaaataccccatgtggccacactgaaactttcctggcttatgccaacaccagcaagatgtggaaaacctgattactgttcttagccctgatcatctcattgggtttatcaccctgtgcctggctgccttcctaacattttctacagtaagtaagactggctctacctttcta

SEQ ID NO: 8315 - DNA, 331 bp, Homo sapiens
tcgatctagaggatcccacaacattggctcgactcaaggcctgacacaacttctgttgtcttcttgatcaccttccttgaagagaggggccaaagccggcacgttctgcggagactgtctctagacctaggaaggggcacaccagggcagcggacgatttgctccgcgtctctcaaaactactgccagcccaattagtaaaccgagagggcagccctgagatgcaggatggccagagagttgaaatgagtctgggagttaagagtgggatggggcggacgaacaggcgtggggagggtaaacaacgcaccaggagcgggagtgagaacagg

SEQ ID NO: 8316 - DNA, 570 bp, Homo sapiens
atttcagccgctttgaggtcaacggtagaataggaaatatcttcctatagaaactagacagaatgattctcagaaactccttttgtgatgtgtgcgttcaactccacagagtttaacctttcttttcatagagcagtttggaaacactctgtttgtaaagtctgcaagtggatatatagacctctttgaggccttcgttggaaacgggatttcttcattttatgctagacagaagaattctcagtaacttctttgtgttgtgtgtattcaactcacagagtggaacgtccctttacacagagcagatttgaaacactctttttgtggaatttgcaagtggagatttcaagcgatttgatgccaacagtagaaaaggaaatatcttcaaataaaaactagacagaatcattctcagaaactactttgtgatgtgtgccttcaactcacagagtttaacctttcttttcttagagcagtttagaaacactctgcttgttatgtctgcaagttgatatttggacctctttgaggccttcgttggtagacggggtttcttcctttaatgctaga

SEQ ID NO: 8317 - DNA, 2278 bp, Homo sapiens
gtcaaagatatatcagacattagtcaaatcgatgaaaaccaattttattcagtaactactgaccgtagaggaaggggctggttctgttcgcatttgtgcagaggtgatggcattctaatgggagagagaggcaggggagagggcagggggcagggcacaagtgaaacattacaaaagattggtcattttaaatgtctgcctcatcaggacagctgtgtctgccagctggcaatattagaagttaggattctaacctcccacagagactggaagacagaggctcagtccttcctgagaactacacctcaaaagtattgcctttcagatcctgggcaaagatacattgaagtccctaggagatacacacatatatcaaagggatggaggaaggattcccttcttagtaagtgctataagaaagaaagatcctgaaactgccatcatcaagtattggctagactaaagtaagttcccctggcagccttgagctttcttaggtaggcattgtcatgggagcctagggtcattcgtgagacatggtctcatgctactagaagccatgatagactctgatcatctcttagcacagaggtttaaactcagtcgttttgtgctgagtttggtggttctcactttctctctccccattccattgtcaggattttactggactctgttagatggacaaggccatgggccattttcaatggtttttaagcagctgaggcatatctattgagaactaaattaaaataaaaccatgagattgagagtgggccccacaataggtatccattacccatattcaaggagatggagaaaaatatttctagactttgtcaaaatggaaagtgacttatgcagccaggatgaaattcaaacttacattactgaagtatagagcttattgatattttttaaaagaaagtcatggcaaaatgacaatccacaagtggcaatggtagataggggtagggagaaactctgtaaggtcaaaattatcctcactttaaatgaaactcctacatgttgctactataagggaacggaagccaatgttacgctcgactatactaattgtcatgggataaacaggcaggacatgatgccacatttattagtcacttctattgatagtatttgtgaaaattaatttttgtgtcaatttgcctgggtcgggggtgcccagacatttggttagacattatttctcactgtgtctttgagggtgtttctggaagagattgacatttgaatcagtaaactgagtgaagcagattgccctcccgagtgtgggtgggcctcatccaacccatggacggcttgaatttttttttttttttttttttttttttttcacgggtgactatagtttaatgaatcagagtctggaatcttaagccccagaaactttcaggaaaggcaagcagattcactgacccccacgtgtatctttatgtgtaatgaaggttttatgggaactgagggaagatggggagagaagggcaaattaaactcctaagataaatagagctgaagactgagagctaatcagaagttctcagatgaaactagattcttgatattgctacaaaaggtttctttctgatctgccatcgcagtaaccgttgtggacgatcagcctgtactgcctggccaggcacagctcctcctgccgctgccttacaatcttctgcgcttctgggggcaggccgttggggtcccgggaaaacacgaaggagtagctgtcagcacaggtgccatcgaggttcaggaggcggcaggagtactgcacggcatacgtgtcgtagtctgtgtcgacgatccagtggtcatcatttcctttctggagaaaggaggctacgccccagtacttcatcttgaacttggcagggtcctcggtgtctgtgaaggtgcccaccatgtctgcgcacacgtcccagttattcaaaagacggactcggcccttggctgtggcgctcatctggccggtctcgtccacggagaactccgcgacgatgttgtcctgcagaaagaggccctcggggtccttcttggccatggcgtaccaggtcccagagaagcgagccttgtcgaagttctccttgactcggaagctgctcactcggcagtcgcgctccgcgccgctgcccacgccgccaacagcaagagcgcccacacccacttcatcttgcccaggaatccgcccaccgggaggggaaccacgcgcaagcctggccgccgagtccgggcgcgcgtggagcgagggaggcgagcg

SEQ ID NO: 8318 - DNA, 1004 bp, Homo sapiens
  misc_feature (950)..(1001): n is a, c, g, or t
gcggccgcgtcgaccggcgcggctggagcgcagcgccgaagggactggcagggctgaagtgtgcgggacagcaagcccccgaatagccccggctgccacctcgcaggacccaaggccacgcgcgccgggcccagctgagccgcctcatgaagccgcccgcggaggacctgtcggacgcgctgtgcgagtttgacgcggtgctggccgacttcgcgtcgcccttccacgagcgccacttccactacgaggagcacctggagcgcatgaagcggcgcagcagcgccagtgtcagcgacagcagcggcttcagcgactcggagagtgcagattcactttataggaacagcttcagcttcagtgatgaaaaactgaattctccaacagactctaccccagctcttctctctgccactgtcactcctcagaaagctaaattaggagacacaaaagagctagaagccttcattgctgatcttgacaaaactttagcaagtatgtgaaacaagaagttctgggtcctttcatcataagggagaagcttcagaaagttccgaggacctgctaaaatcagctactagaatctgctgccagaggggacaaagacgtgcactcaaccttctaccaggccactctcaggctcaccttaaaatcagcccttgatcccatttctgggcaatttagacagtgaaactgactttgtttacctgcttgcagcatattagaacagacgatccatgctaatattgtattttctcttaaaacatagctttcctgtaatttaaagtgcttttatgaaaatatttgtaattaattatatatagttggaaatagcagtaagctttcccattataatatatttttgtatacaaataaaatttgaactgaacctcgtgccaaaaaaaaaaaaaaaaaaactcgagggggggcccggaaccccattcggcctatannnnnnnnnnnnnnnnnnnnnnnnnnnnnnnnnnnnnnnnnnnnnnnnnnnncag

SEQ ID NO: 8319 - DNA, 6115 bp, Homo sapiens
  misc_feature (1729)..(1750): n is a, c, g, or t
  misc_feature (6027)..(6028): n is a, c, g, or t
  misc_feature (6041)..(6041): n is a, c, g, or t
  misc_feature (6060)..(6060): n is a, c, g, or t
  misc_feature (6063)..(6063): n is a, c, g, or t
  misc_feature (6068)..(6068): n is a, c, g, or t
  misc_feature (6074)..(6075): n is a, c, g, or t
  misc_feature (6087)..(6087): n is a, c, g, or t
  misc_feature (6091)..(6092): n is a, c, g, or t
  misc_feature (6104)..(6104): n is a, c, g, or t
  misc_feature (6113)..(6113): n is a, c, g, or t
ggacgcgtgggggcgggcgaacgaggccccacctctgccgggagcgggacgagcgcgcaggcgcagtctccccaggttgtagacgctgcggcccggcccggcgggtaaataacagatgcgggtgaaagatccaactaaagctttacctgagaaagccaaaagaagtaaaaggcctactgtacctcatgatgaagactcttcagatgatattgctgtaggtttaacttgccaacatgtaagtcatgctatcagcgtgaatcatgtaaagagagcaatagctgagaatctgtggtcagtttgctcagaatgtttagaagaaagaagattctatgatgggcagctagtacttacttctgatatttggttgtgcctcaagtgtggcttccagggatgtggtaaaaactcagaaagccaacattcattgaagcactttaagagttccagaacagagccccattgtattataattaatctgagcacatggattatatggtgttatgaatgtgatgaaaaattatcaacgcattgtaataagaaggttttggctcagatagttgattttctccagaaacatgcttctaaaacacaaacaagtgcattttctagaatcatgaaactttgtgaagaaaaatgtgaaacagatgaaatacagaagggaggaaaatgcagaaatttatctgtaagaggaattacaaatttaggaaatacttgcttttttaatgcagtcatgcagaacttggcacagacttatactcttactgatctgatgaatgagatcaaagaaagtagtacaaaactcaagatttttccttcctcagactctcagctggacccattggtggtggaactttcaaggcctggaccactgacctcagccttgttcctgtttcttcacagcatgaaggagactgaaaaaggaccactttctcctaaagttctttttaatcagctttgtcagaaggcacctcgatttaaagatttccagcaacaggacagtcaggagcttcttcattatcttctggatgcagtgaggacagaagaaacaaagcgaatacaagctagcattctaaaagcatttaacaacccaactactaaaactgctgatgatgaaactagaaaaaaagtcaaagcatatggaaaagaaggtgtgaaaatgaacttcatagatcggatctttattggtgaattaactagcacggtcatgtgtgaagaatgtgcaaatatctccacggtgaaagatccattcattgatatttcacttcctataatagaagaaagggtttcaaaacctttactttggggaagaatgaataaatatagaagtttacgggagacagatcatgatcgatacagtggcaatgttactatagaaaatattcatcaacctagagctgccaagaagcattcttcatctaaagataagagtcaactaattcatgaccgaaaatgtattagaaaattgtcatctggagaaactgtcacataccagaaaaatgaaaaccttgaaatgaatggggattctttaatgtttgccagcctcatgaattctgagtcacgtctgaatgaaagccctactgatgacagtgaaaaagaagccagccattctgaaagcaatgttgatgctgacagtgagccttcagaatctgaaagtgcttcaaagcagactgggctgttcagatccagtagtggatccggtgtgcagccagatggacccctttaccctctgtcnnnnnnnnnnnnnnnnnnnnnncaggagactgacagtggtgataaggaaatggcagaagctatttctgaacttcgtttgagcagcactgtaactggagatcaagattttgacagagaaaatcagccactaaatatttcaaataatttatgttttttggaggggaagcatttgaggtcttatagtccccaaaatgtttttcagaccctttctcagagctatataactacttctaaagaatgttcaattcagtcctgtctctaccagtttacatctatggaattactaatggggaataataagcttctatgtgagaattgtactaaaaacaaacagaagctgccaagaagcattcttcatctaaagataagaaaagaaagtagaaggagtttatactaatgccaggaagcaattgctcatttctgctgttactaaattataaaaatgaaaaagattttcatccggggtgggcttggagtctctcgtaaaagtaaacagacatgtagattttccacttatgctcgatttagcaccattctgctctgctacttgtaagaatgcaagtgtgggagataaagttctctacggtctctatggcatagtggaacatagtggctcgatgagagaaggccactacactgcttatgtgaaagtgagaacaccctccaggaaattatcggaacataacactaaaaagaaaaatgtgcctggtttgaaagcggctgatagtgaatcagcaggccagtgggtccatgttagtgacacttacttacaggtggttccagaatcaagagcacttagtgcacaagcctaccttcttttctatgaaagagtattataactattaatggtaatgattatttaggtcatttgtttttgaatgccacagtgataactataatatataatgtgcctttctagtcttccctcttctgtaggaatagcatgttcctcaaatggtcctgaactttttcaccattttggtgaacccttttaaagtaaatttactcaatgctttaaaattcatagtcttaaaataaatgtgaattttgtttccaggtatttattctggggtacaaaaacttcccagaatttacagtaggaaaggaaacccctttatgatgtggcttattattacaagcattcagaaatgatgctggctaagtcaaatcattccttgggacagtgattcctaaatgtaatgccaccttcctgaactctcacatattctatatcatggttattttaaaaaatatatttttagccttttgtaaccttagtcttgttttgagcaatcatattccatgttttatgtgcttttatatttttataataaatattaaagtaaaactattaaaaattgtttatccacgtaccacttaacttaaaatcatctcagggccatctagtggtatatatgtgtactaccatttaggaaactgctataacacataatttcatgaagtaacacctaatacggtgtagttccctggtcatattttatacaattcaaccatataaaagggtgtcactgtaatttcagtagtgtgggtttacaaataatctgctggttagcttattaccttgaggttttgaaaaactagaattatattgaggcatttcataaacatatctcttgcaccctcttcatggtggagttaaggataacttgcaggtggttggccaaggcccaatatagatgattataacatttagaattggcaattagaagttgataatccatataggaccataggatagctttgaaatataaattaccaaattatatttgtaaatgatagagaattatattcttaacagaaaaatatatactttttctacttcttgtaaatactaaacacagttttggggttttgaaatcactttgtcttcagcaagcatcattaataagttcaggtgaatttagcttttaatggggcattaagctggcatttttgattttctttttaaataatagcaaaaatatcatttttcccctctagaatacaaattattgagctgtcaaaacttggcatgaagaatatactattacttaggcttaaatatcaaaagataatggctacttcagtgtcatattgttgaaatagaaacaaaactgcatggttcaagcatcctaatcattagtgccaatgaatgatagtgcaggcaagtgccaggtaaatgcctagtcccacttcattctcctcctgggaagaaaggataagaatagtggctgcagataaggtatggaaatatttaatcaagactgtcttaaacacataagcatatataatgttatcaaggttaccagtgctgccttttgatatatggatgaacataactgtaattaaagacggtaatagtatacaaaatgcagagcttaaaaatgtcattgcataaattctatttttaagatgttgaaatgttagtagtgtttttcttgatttttaacagtgaaataatcaagaaatatatctttaagttaatctgcaaagtcaggctgtgttctgtaaaaggtatttcacagcattttctgtttaactgtaatctgttatcatggagatctcagtaccagagcagtgaattttttgaaaaatattgactgtctttattcaagtcagccatcttggtaagagcagttttcatccccccactgcccaaatgtaaatatagatcacctaatttttcttacagaaagatactgttaagaggcatgcacttttcatcggatggtcacttgtttcttgtttcaaagacaaatatttggatagatacccatacttgctatgagtcagtcacagtgctgacactattttaacatcatttaaaatggaaagatctacatagatttttgacattattccagaagtaacatgcaagtaagatatttttattgtcattttcttcatgttaaaggagctacttatgaaacctatttttttatggcctagagtttatgagtgctttttccttgtcttctgaaaatggaataaattggatttttgatacttaagaatttcctaaagatagcttttgtaacagagaaagcatgttaaattacacatgggtctaccttaaaatttttgttattatttccaaagcatatttgcagggatagtaaatgtatatagtagcaagtctactataataacagtagtttctggatcacctcaggaaacagtataaataaataataatgtttacttatcatcaacataactaccatagtgtttgaatgaattaaagtttcattagctttatttagaaactggtttaccccagcttcccgtttttttccaaatataaaatgataaaatattgattatgtgccaatattgtcatttaatgttcttaaaacttgtgaaggccacctttttaggtagctgagaagagtgatagttggtatcaatttgttagccaggcatggtggctcatgctgttgggaggctgagtggggaagatgcttgagcccaggaggtcaaggtgcagtgaaccatgatcacaccactgcattcctgcagagtgacggagtgagaccctgtctcaaaaataaataaaaagaagacagttggtatcaattcaaagaatagttgttgcctgttctcttattttaaatgtaccaacagagctattttactgtatttaatagttcttagcttccatgtgtgatgattttaatcagtgattttatgcaatagctgaagaaaattttctgaagattaagctgtgaaatgtatcaaccctcatctaatttttgtagtacaaaatgacatcctgattccttttaaaaattcacgtttgtaatttatttttctgcatgtattgatcaaataagcctaaaccaaatatgtgcaataaaattgagcctttagatagtatctagtgcattgttaaaaaagattatttctagatatttatgatgtttttgtttacgtagaaatcatgaattcaaatctgtttgaaagatgactatattttcaattttgagtaatacatattattcctactgttttttttcttttgccatgtttctagaaaacagctgtgtaacttattgagcgttattttggtgttactgtataaaacatgcataataaatattcttatttatctcatgtaaaaaaaaaaaaaaaaaaaaaaaaaaagtttacgttattgacagaatgttttatcaacaatgcatttgcttatgtcttagtccactcaggctgctataataaaataccatcaactaaaaaaaaaaaaaaaaaaaaaaaaaaaaaaaaaaaaaaaaaaaaaaaaaaaaaaaaaaaaaaaaaaannaaaaaaaaaaaanaaaaaaaaaaaaaaaaaanaanaaaanaaaaannaaaaaaaaaaanaaannaaaaaaaaaaanaaaaaaaanaa

SEQ ID NO: 8320 - DNA, 349 bp, Homo sapiens
  misc_feature (303)..(303): n is a, c, g, or t
  misc_feature (321)..(321): n is a, c, g, or t
  misc_feature (338)..(338): n is a, c, g, or t
ccaactacattgtggaaaagagagacgtcaggcgaaaaggctggcaaaacagtggataccactgtaaaggacaccaagtgcacagtcacccaactgactgagggctctttatatgtgttccgagttgctgcagaaaatgatataggtcaaagcgactacaccgaaattgaggactctgtgctggccaaagacacctttaccactcctggaccaccctacgccctggcagtggttgatgtgacaaaacgacatgttgacctaaagtgggagccacctaaaaatgatggtggaagaccaatacanagatatgtcattgagaanaaaaaaaggttaggtanccgttgggtgg

SEQ ID NO: 8321 - DNA, 2768 bp, Homo sapiens
gtggacacacaagagttaactggcgggtgtgacaggcggaccgccctcaggaagtgttactcactggggatgtgcgtgccttgccttgggactggattctcttcctgaagcgaaggggctcccagccatggaaagccctggagagtcaggcgcgggctctcctggagcccccagcccgtccagcttcactactgggcacctggcgagagaaaagccagcccaggacccactgtatgacgtgcccaatgccagcggcgggcaggcaggcgggccgcagcggccggggcgcgttgtgagcctgcgggagcgcctgctgctcacccggcccgtgtggctgcagctgcaagccaacgcagcggccgcactgcacatgctgaggaccgagcccccggggacgttcctcgtgcggaaatctaacacccgccagtgccaggccctgtgcatgcggttgcctgaagccagtggcccctccttcgtctccagccactacatcctggagagccctggcggcgtctccttggagggctcggagctcatgttcccagacctagtccagctcatctgtgcctactgccacacccgggacatccttctcctcccgctgcagctccccagagccatccaccacgcagccactcacaaagagctggaggccatctcccatctgggcattgagttctggagctcctccctcaacatcaaggctcagcggggcccggctggaggcccagtgttgccccagctgaaggcccggtcccctcaagagctggaccagggcaccggagccgccttgtgcttcttcaaccccctgttcccgggggacctagggcccaccaagcgggagaaattcaagagaagcttcaaagtgcgcgtgtccacagagacctccagccccctgtctccacctgccgtgccacctccccccgtccccgtgctgccaggggcagtccccagccagacagagcggctgcccccttgccagctgctacggagggagagctcagtggggtaccgcgtgccagcaggcagtggccctagccttccgcctatgccctccctccaagaggtggactgcggctcccccagcagctccgaggaggagggggtgccagggtcccgggggagcccagcgacctcaccccacctgggccgccgacgacctctgcttcggtccatgagcgccgccttctgctccctactggcaccggagcggcaggtgggccgggctgcggcagcactgatgcaggaccgacacacagccgcgggccagctggtgcaggacctactgacccaggtgcgggatgggcagaggccccaggagctcgagggcatccgtcaggcgctgagccgggcccgggccatgctgagtgcggagctgggccctgagaagctcgtgtcgcctaagaggctggaacatgtcctggagaagtcattgcattgctctgtgctcaagcctctccggcccatcctggcagcccgcctgcggcgccggcttgccgcagacggctccctgggccgcctagctgagggcctccgcctggcccgggcccagggccccggagccttcgggtcccacctgagcctgccctccccagtagagttggagcaagtgcgccagaagctgctgcagctcgtccgcacctactcacccagcgcccaggtcaagcggctcctgcaggcctgcaagctgctctacatggccctgaggacccaggaaggggagggctcgggtgccgacgggttcctgcctctgctgagcctcgtcttggcccactgtgaccttcctgagctgctgctggaggccgagtacatgtcggagctgctggagcccagcctgcttactggagagggtggctactacctgaccagcctctctgccagcctggccctgctgagtggcctgggtcaggcccacaccctcccactgagccccgtgcaggagctacggcgctccctcagcctctgggagcagcgccgcctgcctgccacccactgcttccagcacctcctccgagtagcctatcaggatcccagcagtggctgcacctccaagaccctggccgtgcccccagaggcctcgattgccaccctgaaccagctctgtgccaccaagttccgagtgacccagcccaacacttttggcctcttcctgtacaaggagcagggctaccaccgcctgccccctggggccctggcccacaggctgcccaccactggctacctcgtctaccgccgggcagagtggcctgagacccagggggctgtgacagaggaggagggcagtgggcagtcagaggcaagaagcagaggggaggagcaagggtgccagggagatggggatgctggggtcaaagccagccccagggacattcgggaacagtctgagacaactgctgaagggggccagggtcaagcccaggaaggccctgctcagccaggggaaccagaggcagagggaagccgggcagcagaggagtagcttgaagtggccagaagggtcattcggggcgggagaccctgagcctgctgagaaatccttttagcgccagcaagccccacccagggccctgtcctgtgtctgccaccacctttgtctgatacttgtttccagggaagctgggggaactgccacatctgaggaactggaataaagatgagggggcttcgggggcccccagactgtgaaaaaaaaaaaaaaaaaaaaaaaaaaaaaaaaaaaaaaaaaaaaaaaaaaaaaaaaaaaaaaaaaaaaaaagtcgtatcgatgt

SEQ ID NO: 8322 - DNA, 1074 bp, Homo sapiens
  misc_feature (962)..(980): n is a, c, g, or t
tatgataattaatgaacgttttttttttctattttttgtgtgttctttttgttgttgttcttcttctcttctccttttactcttgtggtctcccttattttttaaaaggtttcctttgccgtgttgtacttcgtcttcattgtcccccctggcccccaagtcggagttacgccgtgccccctgcctgccaacatggttttcatgatcagtgtggactgacctcctcaactgtacatgagccggcacatattctgtctaattaaaagaggaggagaaaaaggaaagaaaaagaaaccacaccaaaataccaactacattgcagactataagcatgacggttggtttaactaccaaatatagttctgttctgttttgtattcagtgaaattttcgtcacaggcgagtcaggaaaaatacctgggttgaatgtgaatgttttgcccagaaccccacccgcaaagaaaactaccgaaacactgaattataagcctctctgaaattccgaaggtgcgctcagaccataggggagaagaaagatctgctgtggcttcctggttcaatgccggctccacactcctgggtttgaagaatcacttgggatttgagagcagaggatgcccctaaagaaatctcattatgaattggggtcttcaaagagagaaggttgaaagtggaaagcacttgaaagggctccccggtttgtaaaatatctttaatcattcacattaggtacctcggagttgcgggtctcagatgtggattcatgcatcatttgtgcaatttgaagatagtccatatttcctatttcagtattaggtcctgcaacacttttcaattcttgtagaaggtttttttcaggagtggtgatgtctgatgctcaattactattttccctgtaatcccagcactttgggaggtcgaggtgggtggatcacttgagcacttgagccttggagtttgannnnnnnnnnnnnnnnnnnatcgagactctagtctctgactgccaagctctccatggcttcctggagaccaacacacacaggaacagaagcccggcaacccccaggggaagat

SEQ ID NO: 8323 - DNA, 478 bp, Homo sapiens
gcccggggaaaccctactaaattcgcggtcgcgtcgactttttttttttttttttttgcctcctagtaagtgggtgggtgtaatgactaggccatcttgcaaccatgaggaaaaaggcaagaaattttagaatcctcaccactgacaactagccagcaaccacctactattgacttattatgtgacagaaaaaaaaaattaccaacagggtcaaggtctaaaagccagttgataactggctattctgttacatgcagctcttctgttacattcattactgatgcattgctcctcaacacatatgtgaaataatacaaaacaaggacaaaatacacagcaaacagccacagaggctgactcataatgcactacacacacacacccacaaccactcacacacacccacaccccaccttctttcgtgatagtccagcttctaaaagagccaaatagaaaaatatcacctacactatataag

SEQ ID NO: 8324 - DNA, 1012 bp, Homo sapiens
gcggccgctgccaccctgtggacggcacgtgtgcctgcgagccgggctaccgcggcaagtactgtcgcgagccgtgccccgccggcttctacggcttgggctgtcgccgccggtgtggccagtgcaagggccagcagccgtgcacggtggccgagggccgctgcttgacgtgcgagcccggctggaacggaaccaagtgcgaccagccttgcgccaccggtttctatggcgagggctgcagccaccgctgtccgccatgccgcgacgggcatgcctgtaaccatgtcaccggcaagtgtacgcgctgcaacgcgggctggatcggcgaccggtgcgagaccaagtgtagcaatggcacttacggcgaggactgcgccttcgtgtgcgccgactgcggcagcggacactgcgacttccagtcggggcgctgcctgtgcagccctggcgtccaccgggccccactgtaacgtgacgtgccctgcccggactccacggctgcggactgtgctcaggcctgcagctgccactgaggacacgtgcgacccggtcactggtgcctgccacctagaaaccaagcagcgcaagggctgtgatgggctgcggggcgcgctgctcgtcctgctcgtctgcctgctgctctcgctgctcggctgctgctgcggcttgccgcggcaaggacctaagcgccgatcccgccccgcagggagcttacgctttgggaggaagaagggcgccgcaccggagtatgcgtgcgcttcaagtcgagatcaagcattgaaggcttgcccggattccggctccggatggagaaactaaccaaagtcgtagtggacaccacgatcttggtaacacaatcaatggagtttctggaggcacctcagggttggggagcctcaccaactggccttcgggcccttccttttgaccctgtcaggctgttctggtccctgtaggccggggaggcggcccaaccattcatgccggctccttactcatcgctgagggaacccgc

SEQ ID NO: 8325 - DNA, 1508 bp, Homo sapiens
  misc_feature (1171)..(1503): n is a, c, g, or t
gcggccgccgcctgcgcccccctggactccggcgcctccgagaacagccgcaagcccccttcggcgtcctcggccccggccctggcgcgagagtgcgtggtgtgcgccgagggcgaggtgatggctgcgctggtcccctgcggccacaacctcttctgcatggactgcgccgtccgcatctgcggcaagagcgagcccgagtgtcccgcctgccgcacgccggccacccaggccattcatatcttttcctagagcgcggaccaccacgtggccggggccatctgcgggggccaggggtgggcgcgggagacggggcgggacccggggtgggagagggacggggagggggcgaggggcggaggccgagggggcagggggggtgggcggcggccagtgtttacagatgagctttaactgccgcctcaggcgtggagacggagaccccgcagcccggcggcgcctcagcccttcaacgacagtattgagtggtcaggttacaataaaccggagagaaaaggtccgcttgcactttttttagttttcttatttttagacacccctcccctccagggtgatctttaaaaaagcaaaacaaaaaacacgacttttccagccgctcagccgttttttcctttcgtccgaagccgttttctgatttgacttttctcgccggccggtctcaggccgcacagacgttccagaggaggagggtgacatttttactccctttttggggctaaccatttatgcttttgtacatcaaccgtgcgcggccggaggggggcaggggggcgggggccgaggggcgttccaatcaaatttctaactttctgttaattattaatcccctttttactgcggtttctgttgtcatttttaaaatttttttaattttttttttttttttacttttactttttacctcttgtgtatatgtagggaatttatagggaaatatgtactttatggaataaattttaagaactaaaatatattttattttaaataaagtaatggacctttaatcttacgcagctaaattactgattatatatttgctgagctgatttaagggttaaaaaaattgtatcaagagttttattttttgacttcaaagccttgttaataaagcctcttttatacatgtgaaaaaaaaaaaaaaaaaaaaaannnnnnnnnnnnnnnnnnnnnnnnnnnnnnnnnnnnnnnnnnnnnnnnnnnnnnnnnnnnnnnnnnnnnnnnnnnnnnnnnnnnnnnnnnnnnnnnnnnnnnnnnnnnnnnnnnnnnnnnnnnnnnnnnnnnnnnnnnnnnnnnnnnnnnnnnnnnnnnnnnnnnnnnnnnnnnnnnnnnnnnnnnnnnnnnnnnnnnnnnnnnnnnnnnnnnnnnnnnnnnnnnnnnnnnnnnnnnnnnnnnnnnnnnnnnnnnnnnnnnnnnnnnnnnnnnnnnnnnnnnnnnnnnnnnnnnnnnnnnnnnnnnnnnnnnnnnnnnnnnnnnnnnnnnnnncggga

SEQ ID NO: 8326 - DNA, 1532 bp, Homo sapiens
  misc_feature (183)..(186): n is a, c, g, or t
aaaaatacaaaacttaagccaggcatggtggcaggtgcctgtaaccccagctacttgggaggctgaggcaggagaattgcttgaacccaggggcggaggttgcagtgagccgatatcacgccattgcactccagcctcggcaacaagagtgaaactctgtctcaaaaatggggttcttttccnnnnatcaaaaatcatgtttcttttaaaaacaagttcaaacattaccaaagtttatagcacaggaaatacgtcttctgtaatctcccttaaccaatatatccctcaacattctcctcacccccaactccaccctcccaggataaccagttgggacataatctttatttaaaaatggtttccggatagagaaagcgcttcggcggcggcagccccggcggcggccgcaggggacaaagggcgggcggatcggcggggagggggcggggcgcgaccaggccaggcccgggggctccgcatgctgcagctgcccccgggcgcccggccgaggccctcgccgcggagccgcgcggagcggagccggcgagctaacccgagccagccggcgggcgtcccggaggcggtggcgcagggaggggcccgacgctcgcacgtggccccggcggccgccatggcggacagcggcaccgcggggggcgcggcgttggcggccccggcccccgggccgggcagtggcggcccaggaccacgcgtctactttcagagcccccccggggccgcaggagagggcccgggcggggcggacgatgagggcccagtgaggcgccaagggaaggtcaccgtcaagtatgaccgcaaggagctacggaagcgcctcaacctagaggagtggatcctggagcagctcacgcgcctctacgactgccaggaagaggagatcccagaactggagattgacgtggatgagctcctggacatggagagtgacgatgcccgggctgccagggtcaaggagctgctggttgactgttacaaacccacagaggccttcatttctggcctgctggacaagatccggggcatgcagaagctgagcacaccccagaagaagtgagggtccccgacccaggagaacggtggctcccacaggacaatcgctgccccccaacctcgtagcaacagcaataccgggggaccctgcggccaggcctggtgccatgagcagggctcctcgtgcccctggcccaggggtctcttcccctgccccctcagttttccacttttggggttttttattgttattaaactgatgggactttttgtgtttttatattgactctgcggcgcgggccctttaataaagctaggatacgcctttggtgcaaaaaaaaaaaaaaaaaaaaaaaaaaaaaaaaaaaaaaaaaaaatggcggagaaaagaagggaatgaaaatgggcaacatgggccataacctggtttcccctgaaccccagctttttcttggtaacaaggggggaaagaattctggcccgggtcctccccttatgaggtggagctcggaatttaaaat

SEQ ID NO: 8327 - DNA, 1532 bp, Homo sapiens
ctccttaatatctagcttttatttttagcttttaattgtttataagagaggaaccactggaaagagtttaaaatccttgttccattttcaggttgggaagtgtacgtgtgtgggggtgggtattaaacaagacttgagcattaagcatttcccctcctgagcccagctcctctcctcacttgttgactaagccctgcttcactgagcattttctttttttctgcccacaacctgagtgccccatggaggtgaaggacatagcctgagtctgtgccatcagtcagtagaacaaatgggcttgctctgcctaacatcgggccatctcggattccacctcttttataggaatgagtgatgaagagaggtgggttccgctttgccgctgtattaatacacatcaggggccagctcctagcactaaatcacgctacggcatacatctgttatcggactcttcaccagtgtgatgaacaagactgcagatagaggcttccttgtgtcattctttataggattttcctaaaagaataaatagctcagatctctgccaacactctcccctgtcactgtgatgaattcagcttctttcttaaacatgcagccacaaatcttttccctttttcccctcccccagtggtagaaaagttttgagttgcaattgactgaatttaaagatattattaaggctagaagaggtgaagagcaggaagaaacagcatgtcttccttgcctttttgtactaatagtaacaaaaggccaaggaaaaagactgtaaatgaccatagggttgttaaatagacccatcttgaaagtgtagcacctttattttctttgtatcttcattctccctcctttacggctttctagcatgcaggtgtctagtgcacagaaccacaccctggatcttagtgagcaagcatgctaacctgcttctcagacttgatacaccagaacagggatttccctgcaagtgtctccctcatgctgaagtgaactagctgaaatatgctcttaaagaaagtagtcagaacacagcaacaacaaaagattatcttctccaaaatttgagaccaagtagctgtaaaacataattaaacccagatgaaaaccaggcttcgttttcttgtaaatgattttcctttcatcagaatggtagatcagagccattggtgtgcagattccaattccttttaaaaaagtaaacacatgccttttgataagcggatgaggtgatcagaaaacttctgtggaagaacccaggtaattgtgtgagataattaagtatccccaataactttgcctgaaccttctcttcgggataggatagtgtggctgacagtactccgaagctcctcagtttaccgggcaagtcccgggttccactacggccgcttaagcgcgcacacattgttccattttgatgcctcaaaacgggtcctctgccacgcgcccttaaatcaccaaacgttgggaaaacaaacagaccattacgcgatcacattagcaaccttattcaaaatgcggacaacctc

SEQ ID NO: 8328 - DNA, 2767 bp, Homo sapiens
gagaagggcgcggagcaccggagggcacgacagctgacggagctgcgctgcgttcgcctcgtttgcctcgcgccctccactggagctgttcgcgcctcccggctcccaccgcagcccacccggcagaggagtcgctaccagcgcccagtgcgctctgtcagtccgcaaactccttgccgcccgccccgggctgggcaccaaataccaggctaccatggtctacaagactctcttcgctctttgcatcttaactgcaggatggagggtacagagtctgcctacatcagctcctttgtctgtttctcttccgacaaacattgtaccaccgaccaccatctggactagctctccacaaaacactgatgcagacactgcctccccatccaacggcactcacaacaactcggtgctcccagttacagcatcagccccaacatctctgcttcctaagaacatttccatagagtccagagaagaggagatcaccagcccaggttcgaattgggaaggcacaaacacagacccctcaccttctgggttctcgtcaacaagcggtggagtccacttaacaaccacgttggaggaacacagctcgggcactcctgaagcaggcgtggcagctacactgtcgcagtccgctgctgagcctcccacactcatctcccctcaagctccagcctcatcaccctcatccctatcaacctcaccacctgaggtcttttctgcctccgttactaccaaccatagctccactgtgaccagcacccaacccactggagctccaactgcaccagagtccccgacagaggagtccagctctgaccacacacccacttcacatgccacagctgagccagtaccccaggagaaaacacccccaacaactgtgtcaggcaaagtgatgtgtgagctcatagacatggagaccaccaccacctttcccagggtgatcatgcaggaagtagaacatgcattaagttcaggcagcatcgccgccattaccgtgacagtcattgccgtggtgctgctggtgtttggagttgcagcctacctaaaaatcaggcattcctcctatggaagacttttggacgaccatgactacgggtcctggggaaactacaacaaccctctgtacgatgactcctaacaatggaatatggcctgggatgaggattaactgttctttatttataagtgcttatccagtagaattaataagtacctgatgcgcattgaacgacaatcttaagccctgttttgttggtatggttgtttttgttttcctccctctcctctggctgctacaacttcccctttctggtacaagaagaaccattctttaaaggtgagtggaggctgatttgcagctgaagtgggccagccttgcaccagccaggccagaccaccatggtgaaggcttctttccccactgcaggacccactttgagaaggaccgaggaggaggatttgggttgttttgttaggggttactttcaggggaacatttcatttgtgttatttcttaaacttctatttaggaaattacattaagtattaatgaggggaaaggaaatgagctctacgaggatttcaccctgcatgggagagagcagggttttctcagattcctttttaatctctatttatctggttgtttctgacaggatgctgcctgcttggctctacaagctggaaagcagcttcttagctgcctaattaatgaaagatgaaaataggaagtgccctggagggggccagcaggtcacggggcagaatctctcaggttgctgtgggatctcagtgtgcccctacctgttctcccctccaggccacctgtctctgtaaaggatgtctgctctgttcaaaaggcagctgggatcccagcccacaagtgatcagcagagttgcatttccaaagaaaaaggctatgagatgagctgagttatagagagaaagggagaggcatgtacggtgtggggaagtggaagagaagctggcgggggagaaggaggctaacctgcactgagtacttcattaggacaagtgagaatcagctattgataatggccagagatatccacagcttggaggagcccagagaccgtttgctttatacccacacagcaactggtccactgctttactgtctgttggataatggctgtaaaatgtttaaaaacaaaacaaaacaaaaaagaggcactagtctatctgcaattactcaacgaggcattttcataggaaacagactatgattaatccatttattcttcccacacacttaccttactaagtctttgctttaataaatgagcaaccctgggtatagtcttaaaattctgcacaataaattttgagaaagaattgttcctctttgtaggtatctgtgtattgcaatcattctcaaccaggaggtgattttgccccctgactccaccccagggacattcaaaaatgtctggtgacagttttcattgtcatgacttgggggtgctactagaagccaggaatgctgccaaacattctaccatgcacagcacaacctacaacagcaaagaatcatccaccccaaaatatcagtagtgccgagattgagaaaccctgatttatcacaatgcccactgtgacagaacaagacactcacagattagtgatacgttttatttttaacaaaatgaaatgatgtgttaagtttttatttccaaagtgtttagtttattggctgatgggttgttcttggtatgcatggtgacctttttatttctgt

SEQ ID NO: 8329 - DNA, 2643 bp, Homo sapiens
gaccagattccttctaaaagaaggaaggccatgtctgcctgaagcctattggccgggcctactctggacccgcccctcttttttttttcatgacacacaccacagcgaagtctgtgcggaatcctaaaccagcccaatttacatccattcatgaatctgtgacgtcagcaagcctttgggctcctttgcggtgggctggaggattgtgtgggtggaatccccctcccctttatttttccaattctgcaaggcttttaaaattcaccttacatcttttcaaagcaagaaaatggaacagcatgtgtaggaattcttcgttgttgtgagtattgcactctgtttttcctgtttcttcagtatttatttcacaaggacagacagagaatgtgtgatttgaggtgattagaaagctgatattattgagggcgacaccgtgagagagacagagagacagaggcggagagaaacccgaaaccccgttacagctaggagcctccgaaactgacagctggttttcctttgcttgtctgcctgctagacgtggacatttttcatttacggttctgcacgttacctcggatgcctgcttggctttccttaaagggagattcatttctctgagagatgatgtggatggtattagcagaaaagcccagaacaccagaaaggtgctgagaaaagcggggcccgcaagacagagcaggttctatcctgtggggcacttgtcttccttgcgaccgtcctttctgccgttcctcacccttcaccttgcctttgtttcatattgtgtaacagtcagtatcttgcgattgcaatttggtgaagatgaatacttgttcaaccatttttcaaaagctcttatgacgggagccatagtggtgtatttatatatattcatagctcttctttatgtcactctctacactttatagtgtcaaaaacttaaaaagctgcattcgagggaaagggggaattatccttaaacttgggtttttcaatatcctctaatgaaaactaagaagtggttacaatgttccacaattatattgcatagaaatgcacatgagtgttttcctaagatgaacttattagctgaaaatagtttattccactgtgttggggaaacatggaaaagttctgatatgttccatgtataaagttggtttggtagtttgctactgtagttttaacaaaaagttactatttgtgattgaatttgttttccaagggtctgtttattctggtgaaagttgtgagagtaaagaagagggatgtgacattgtgacatgttctgcccctggggcagctcctcaacccgaataatctgacagcatttcccaactgcttcactttgagcgatttatatgccagtctgcagcatgtacccagttgttctttctcctgagaaagcaaaatgcctgatatttcttataatccaggctgccacgtttaccttgtaaaatcaatacttaatttttagatttttatattatcttttctcgtgaagcaagacttctaaattatggctataatatcttttgaattgttgttcttaatgaatcttccaactgtaaactcatctaatttcaaacttatcatacctgaggatgtaacattgtcctttgtttctcatcttgatattaccgtcaatcattttgtatttctgagtacatttgaacttgctggagtaatagagggaaaacctctgcctgattctaaatcagatctttgtcctatactcggacaattatggtttcatattttattattttttattttctgggtttaacaaatgagataacattttagacataatatttgtaaacatcttgacttatttcagcattttccttttttgtgtatcttcagagagtttgttgaaagtagcaatttccaagtaattttaaattattgaagtctactagcacgaaaggtcaaattcttaggatatttaaaaaatgttgtttaataatcaaactcatcttaaaaaatgttcatcagactctgtctttgatgcacattttgccaaaagagagccttatttctgtgaaagaaatacagtatgtactttggatttactaaagtaaaactgttactttaaggcacagagcagatatagaatccccctctctccccactcctagtgactgtattctacattatatttatcttcatgcatagtgtacttgtagggaaaaaaacaataactcttaattgtttaatatcaaacaataaaatcctgtgtatcagtgactgtcaatagatggctttctgtttaaaaactgaagctactccagaagtaggaattaatttatttagtaaacaaagtcagtcaaaccagagccatgtcctggggaactgtcaaaagaatggttcctaagggccagaggccacatccactggtagatgacagaacaaccatacttcagatggcaaaaccggtcagtttggtttgcgttgtgtgcctatcctctttctgtgtgcttcagctgaattaagtgcttggagagctcaaatagttcaagatagccaagatgaccaattctgccaggtggcagcctgatcttgcaattttgattaaaataaagaacattccccaagaacagtttgttgcaaaaaaaaaaaaaaaaaaaaaaaaaaaaa

SEQ ID NO: 8330 - DNA, 2295 bp, Homo sapiens
gcccccgggagccgtgtggtgttcacacgcatcacaggttcaggagaatgcaggagggggcctgagaagagctgcggatttggtcactcccgggaagcgttaggtagagtggagagcagagccagaccgcggggctccaggaagtggagatcctgtggttaaatagacgttgccgcacgtggagctcaatagacaattcttgtgtttgactgttccaggagaggagtggatgattcggaaggtgaaggtggaggacgaaagatcaggaggcagaagaggaggtcgaatggccccagcatctatcgttacttcccagcccctttcccgcgcctgacctggggcatctggctgccgcgtacaaactggagccaggtgccccgggggcactgagtgggctcgcgctgtctgggtggggtccgatgccggagaagccctacggctgcggggagtgtgagcggcgcttcctgggaccagctgacgttgcgactgcaccagcggctgcaccggggcgagggcccctgcgcctgcccggactgcggccgcagcttcacgcagcgcgcccacatgctactgcatcagcgcagccaccgcggcgagcggcctttcccgtgctccgagtgcgacaagcgcttcagcaagaaggcccatctgacccgccacctgcgcacgcacacgggcgagcggccctacccgtgcgcggagtgcggcaagcgcttcagccagaagatccacctgggctcgcaccaaaagacccacaccggcgagcggcccttcccctgcacggaatgcgagaagcgctttcgcaagaagacgcacttgattcggcaccagcgcatccatacgggcgagaggccctaccagtgcgcacagtgcgcacgcagcttcacgcacaagcagcacttggtgcggcaccaaagggtgcaccagacggccggcccggccaggccctctcccgactcgtccgcttctcctcattccactgccccgtccccgaccccatcctttcccgggccaaagcctttcgcgtgctccgactgcggcttgagcttcggctggaaaaagaacctcgccacgcaccagtgtctgcaccgcagcgagggtcgcccctttgggtgcgatgagtgcgcactgggcgccaccgtggatgcccccgccgccaagcccctggccagcgcgcctggcggaccgggctgcggcccaggatccgatcccgtggtgccccagcgcgccccctcgggcgagcggtccttcttctgcccggactgcgggcgcggcttctcccatgggcagcacctggcgcggcacccgcgcgtgcacacgggcgaacggcccttcgcctgcacgcagtgtgaccgccgcttcggctcgcggcctaatctggtcgcccactccagggcccacagcggcgccaggcctttcgcctgcgctcagtgcggccgccgcttcagccgcaagtcgcacctgggccgccaccaggcggtgcacactggcagccgcccccacgcctgcgccgtctgcgcccgcagcttcagctccaaaaccaacctagtccgccaccaggcgatccacacaggctcccgccccttctcctgcccgcagtgcggaaagagcttcagccgcaagacccacctggtgcggcaccagctcattcacggcgaagccgcccacgcggccccggacgccgcccttgcggccccagcctggtccgctccccccgaggtggcgccgcccccgctcttcttctgagcctagttctcacgaggaccctttcttgcccacagtttcgagaggcccgtgccatgagaccgcctggggtgagcaaggcgacctgggctgctgcccgaaggtttggccgccgcgggacacctgtttccttcccgcagtgtctgcgtccgcacagcatacccagctcggacctcctaggacagagactcagcgaacccttgctgggaaccgctgagctgaagttcttggaaggctcccacccaggtgccccgttggaaagcagatatttcccggacccagcgcggcctcaaccagggcaggaaagagtggttatttatgtacttaaagtttcattaaagttaaaatcggaaagttctggggctgctaaatgaattgggggagggaacacctgactctccttagccactgtcccacctccatccacacacagaccacccccctccacttccccttctgtcctgggtgagttacatttagccagctgctgttaattggttctccccaaataaaaatgtaatatatttattcactaaaaaaaaaaaaaaaaaa

SEQ ID NO: 8331 - DNA, 2013 bp, Homo sapiens
  misc_feature (1145)..(1151): n is a, c, g, or t
aagctagtacgaggctggttgccctcggccgtggccacggaaggccatggtctccccacggatgtccgggctcctctcccagactgtgatcctagcgctcattttcctcccccagacacggcccgctggcgtcttcgagctgcagatccactctttcgggccgggtccaggccctggggccccgcggtccccctgcagcgcccggctcccctgccgcctcttcttcagagtctgcctgaagcctgggctctcagaggaggccgccgagtccccgtgcgccctgggcgcggcgctgagtgcgcgcggaccggtctacaccgagcagcccggagcgcccgcgcctgatctcccactgcccgacggcctcttgcaggtgcccttccgggacgcctggcctggcaccttctctttcatcatcgaaacctggagagaggagttaggagaccagattggagggcccgcctggagcctgctggcgcgcgtggctggcaggcggcgcttggcagccggaggcccgtgggcccgggacattcagcgcgcaggcgcctgggagctgcgcttctcgtaccgcgcgcgctgcgagccgcctgccgtcgggaccgcgtgcacgcgcctctgcccgtccgcgcagcgccccctcgcggtgcggtccggggactgcgcccctgcggcaccgctcgaggacgaatgtgaggcgccgctggtgtgccgagcaggctgcagccctgagcatggcttctgtgaacagcccggtgaatgccgatgcctagagggctggactggacccctctgcacggtccctgtctccaccagcagctgcctcagccccaggggcccgtcctctgctaccaccggatgccttgtccctgggcctgggccctgtgacgggaacccgtgtgccaatggaggcagctgtagtgagacacccaggtcctttgaatgcacctgcccgcgtgggttctacgggctgcggtgtgaggtgagcggggtgacatgtgcagatggaccctgcttcaacggcggcttgtgtgtcgggggtgcagaccctgactctgcctacatctgccactgcccacctggtttccaaggctccaactgtgagaagagggtggaccggtgcagcctgcagccatgccgcaatggcnnnnnnngcctggacctgggccacgccctgcgctgccgctgccgcgccggcttcgcgggtcctcgctgcgagcacgacctggacgactgcgcgggccgcgcctgcgctaacggcggcacgtgtgtggagggcggcggcgcgcaccgctgctcctgcgcgctgggcttcggcggccgcgactgccgcgagcgcgcggacccgtgcgccgcgcgcccctgtgctcacggcggccgctgctacgcccacttctccggcctcgtctgcgcttgcgctcccggctacatgggagcgcggtgtgagttcccagtgcaccccgacggcgcaagcgccttgcccgcggccccgccgggcctcaggcccggggaccctcagcgctaccttttgcctccggctctgggactgctcgtggccgcgggcgtggccggcgctgcgctcttgctggtccacgtgcgccgccgtggccactcccaggatgctgggtctcgcttgctggctgggaccccggagccgtcagtccacgcactcccggatgcactcaacaacctaaggacgcaggagggttccggggatggtccgagctcgtccgtagattggaatcgccctgaagatgtagaccctcaagggatttatgtcatatctgctccttccatctacgctcgggaggccgcgacgccccttttccccccgctacacactgggcgcgctgggcagaggcagcacctgctttttccctacccttcctcgattctgtccgtgaaatgaattgggtagagtctctggaaggttttaagcccattttcagttctaacttactttcatcctattttgcatccctcttatcgttttgagctacctgccatcttctcttt

SEQ ID NO: 8332 - DNA, 2277 bp, Homo sapiens
aggcaaacacagccggaggtgagcacatacctgcttcgcaccccatgcgcctaaccacaaggttccctccctccaggaaggccgttgtcttccctgggacgacttgccagctctgaggcatgacagtacgggcccccagaagggtgaccaggaggccctcctcgtcccagctgccggcgtcgccgcccactgcagggcccgggctgtgactcgtggggacggttccctgcgccccggcgggggaggtgggcggggaggggcggcggggcgccggggcggggctcgggacggccgggctgggagctggagcccacagcgggaagcggccgccgcccgggccgcgcagggctaggcgaggcgagggggggcggggccgggcgctacgggaaggggaggccgcgcggaccgggagccgcaccgcgccagccgggctgcagcggccgcgcaccaaggctgcgatggggctggagacggagaaggcggacgtacagctcttcatggacgacgactcctacagccaccacagcggcctcgagtacgccgaccccgagaagttcgcggactcggaccaggaccgggatccccaccggctcaactcgcatctcaagctgggcttcgaggatgtgatcgcagagccggtgactacgcactcctttgacaaagtgtggatctgcagccatgccctctttgaaatcagcaaatacgtaatgtacaagttcctgacggtgttcctggccattcccctggccttcattgcgggaattctctttgccaccctcagctgtctgcacatctggattttaatgccttttgtaaagacctgcctaatggttctgccttcagtgcagacaatatggaagagtgtgacagatgttatcattgctccattgtgtacgagcgtaggacgatgcttctcttctgtcagcctgcaactgagccaggattgaatacttggaccccaggtctggagattgggatactgtaatacttctttgttattataacataaaagcaccactgttctgttcatttcctagctgttctaattaagaaaactattaagatgagcaaccacatttagaaatgtttattgacaggtcttttcaaataatgcttttctaattaatagccaaagatttcatatctaactttgtaaccagaattatacagtaagttgacaccacttagatttaaaggcagacagttttgctttagtacaatagtatacattttataatgatgaacttataatgattaagggacatttctataaaaatactacaatagttttatgcacaacttcccattaaaaatgagatttcttatttgtttgtctgtttttactctgggagtaatactttttaaattacctttacatatatagtcactggcatactgagaatatacaatgatcctggaaattgcagtaacaaaagcacacaacgattatagtaactataagatacaataaaacaaataaatgtgaaagtagattcatgaaaatgtattcctttaaaatattgttttcctacaggcctatttaacaagatgtttcattttactgtatattttgtagttaatataaatgttgctctaatcagattgcttaaaagcatttttattatatttatgttgttgaactaatatatgaaataagtaaatgtagctcccacaaggtaaacttcattggtaagattgcactgttctgattatgtaagcatttgtacatcttctttggaaataaaagataaaagagcgataaaaaaaactttcttttctaacttttccaagcaaaatctaaaatgttttatgacatttttctggctgtgatcttaaaataattcatatctaaatagtattttgtctaggagatgctttctctctagtagttagaaattaaatttgtgtcagcattcctattaatgtctcactttactttcaagttatattggtgctatttaacattttaccaggtaaaatgttacttctgatactttaagtaccaattccactacagcgatccatgtcacgaggacccgggcgtgcgcaccttgggctactggaaacaaattcctaataaaaacaacaggctacaacatcagatttctctcatatgggtgtcaccccaggaacggtcctggctaaggacgggacccatagggaggacccggggtcgaaacacatattggcgggaggaaccgcacacacgtgagagggaaagagacaacacgcggaacgcacaaaaggggggccaccgagaaaggacccaaaatataa

SEQ ID NO: 8333 - DNA, 736 bp, Homo sapiens
cggccgccgcgggcgcgggccgctcgctctacggtgggcccgagctcgtgttccccgaggccatgaaccaccccgcgctgaccgtgcatccggcgcaccagctgggcgcctccccgctgcagcccccgcactccttcttcggcgcccagcaccgggaccctctccatttctacccctgggtcctgcggaaccgcttcttcggccaccgcttccaggccagcgacgtgccccaggacgggctgcttctgcacggccccttcgcacgcaagcccaagcggatccgcacggccttctcgccctcgcagctgctgcggctggagcgcgccttcgagaagaaccactacgtggtgggcgccgagcggaagcagctggccggcagtctcagcctctccgagacgcaggtgaaggtgtggttccagaaccggaggacaaagtacaaacggcagaagctggaggaggaagggcctgagtccgagcagaagaagaagggctcccatcacatcaaccggtggcgcattgccacgaagcaggccaatggggaggacatcgatgtcacctccaatgactagggtgggcgggcccgcccgccaccgcagcctcccagctgctctccgtgtctccaatctcccttttgttttgatgcatttctgttttaatttattttccaggcaccactgtagtttagtgatccccagtgtcccccttccctatgggaataataaaagtctctctctta

SEQ ID NO: 8334 - DNA, 1085 bp, Homo sapiens
attcaagcctgggccctggaaggaggggtggacagtcccctcccttccagtccagcatgggtctggggaagaggagcagctttgcctggaaggggcctcctaggagggggagcggtggtttctagctcaggctttaggatcagagagcagcagattcaaatcctgacggttttggtaaagtcaattcaatctctccaagactccgtttacttgatctgcgaagtggggataatggtatcacgtcgcagggttgtcaggcggagctggtaggggagctgccccccagagcagcatggatgccccgcgaagggacatggagttgctcagcaacagcctggctgcctacgcgcacatccgcgccaaccccgagagctttggcctctacttcgtgctgggcgtctgcttcggcctgctgctcaccctctgcctgctcgtcatcagcatctcgtgggcgccccgcccgcggccccggggcccggctcagcgccgggacccccgcagcagcaccctggagcccgaggacgacgacgaggacgaggaggacacggtgactcggctgggccccgacgacacgctgccgggccccgagctgtccgcagagccggacgggcccctcaacgtcaacgtcttcacgtcggcggaggagctggagcgggcgcagcggctggaggagcgcgaacggatcctgcgggagatctggcgcaccgggcagccggacctgctgggcacaggcacgctggggcccagccccacggccacgggcaccctgggccgcatgcactattactgatgggccctggctcccgccgcaaggcgctcggggtaccggacctgtacatgagctcagagctaccccacaccttcggactgcctcggcccccacagctcccaggtgctactgggcgtggaccgccaccccctgagaggctcccttccccagtcctgccagaagaccccgggggcggggagggggcagcatgcagggtccccactccctctctggggtcgatgaagaggtgaagtgaccaaatgaaagaaagctgcattctcagtgaaaaaaaaaaaaaaaaaaaaaaaaaaaaaaa

SEQ ID NO: 8335 - DNA, 1407 bp, Homo sapiens
  misc_feature (1296)..(1345): n is a, c, g, or t
cgcgaggcgcgccgcgatcggggactgtcctaagacgggcggggcgcgctgcgctagggactgtcgtaaaaggggcgggacgcgccgcggtcgggatgtcgtgaagctgggggagctcgtcgccgccgccggcggctagcgggcgtccgcgccatggagcgctacgcggccgccttggaggaggtggcggacggtgcccggcagcaggagcgacactaccagttgctgtcggcgctacagagcctggtgaaggagttgcccagctctttccagcagcgcctgtcctacaccacgctcagcgacctggccctggcgcttctcgacggcaccgtgttcgaaatcgtgcaggggctactggagatccagcacctcaccgaaaagagcctgtacaaccagcgcctgcgcctacagaacgagcaccgagtgctcaggcaggcgctgcggcagaagcaccaggaagcccagcaggcctgccggccccacaacctgcctgtggttcaggcggctcagcagcgagaactagaggccgtggaacaccggatccgtgaggagcagcgggcgatggaccagaagatcatcctggagctggaccggaaggtggctgaccagcagagcacactggagaaggcgggggtggctggcttctacgtgaccaccaacccacaggagctgatgctgcagatgaacctgctggaactcatccgaaagctgcagcagaggggctgccgggcagggaatgcagccctgggactgggaggtccctggcagtcgcctgctgcccagtgtgaccagaaaggcagccctgtcccaccatagccacaggcagcagaagtctgggcagagttcatcttcttgacctttggccactgccttcccagctgcccgcagggggttccccctgctgaggagagaccaggtggaccccagctgcctgtcacccttcatctgggacttgctgtcaaaccctaggatagtctcataaaggggaggctgggccagcctgctgctgtctgcttcaggaccaggcagagagtgaggctgggggttctcacaccttactccaccgggcacatcccaacctgcactggggcccacccgagcgcttgttctggtctcagccgctcccttggcagctgcagcccccatgcagaagaggctcccaggcccaagctctgtgtgacccagagaaataaagatgcctcagtgtggcccaaaaaaaaaaaaaaaaaaaaaaaaaaggagatatttctgggtgccgcaaaaaaaggcaatggaaaggcgccatgggccataacnnnnnnnnnnnnnnnnnnnnnnnnnnnnnnnnnnnnnnnnnnnnnnnnnnggtctctacttaatgagcgctcccgagtaatatcccaaaacgcccggcctgccccaacgcag

SEQ ID NO: 8336 - DNA, 807 bp, Homo sapiens
gccgccggtgtcggaccgcgcgcggccaggggatgtttggctgcgtacttgcatgagctttccacccacttgagcccagtcctccgggccgttcctcgcccccacccctgtctggcgtgaccccagcctcagcctctttctaagggacttcctcagcacatttgtatttttatatccgactctttgtttactggctctgctcatggttcctgccctcccctcagtctcggccacgctcttctgcgcctggcagataggatgggtgttgaggctgggatgagacaagcccccgacacggttaccaaccacatggccagtctgcccaggcctgaccccaggaggctttctggcagaccccttctccccaaggtatcatcaccttccaagggcccagatccgattttaccttggacccctgcgtcttgcccctgggaacccaaatggggactgctctgaacctttggatgacatctgtggccccggagatgttctcaacccaggggtgcccttcgtaaatgttcctccatcctcactgtaccaggagtgtgtgaataaacacagaccccctctgtgaaaaaaaagccgctgcttaggtctcaggagccaggccaaaatgggagggggggcaggtacttgggaatctcaggtgcatgttgctggtgagggacggttgccaagtaagacagacaggccaggctggcctgggaacctcattatgatgtggcctccttgggtagagatacaacccaggcgtgactggtcaccagtgttggggatggagctagggtgagaaacataaagcaatcc

SEQ ID NO: 8337 - DNA, 1708 bp, Homo sapiens
  misc_feature (1383)..(1383): n is a, c, g, or t
agcggccgcggcggcggcggcggcagcagcggccgaggcggggctgcacgtctcggcactgggcccgcacccgcccgccgcgcatctgcgctccctcaagagcctggagcccgaggacgaggtggaggacgaccccaaggtgacgctggaggccaaggagctgtgggaccagttccacaagctaggcacggagatggtcatcaccaagtccgggaggcggatgttcccccccttcaaggtgcgagtcagcggcctggacaagaaggccaagtatatcctgctgatggacattggagccgctgacgattgccgcgataagttccacaactcgcgctggatggtggcgggcaaggccgaccctgagatgcccaaacgcatgtacatccacccagacagcccagccacgggggagcagtggatggctaagcctgtggccttccacaagctgaagctgaccaacaacatctctgacaagcacggcttcaccatcctaaactccatgcacaagtaccagccgcgcttccacatagtgcgagccaacgacatcctgaagctgccttacagcaccttccgcacctacgtcttcccggagaccgacttcatcgccgtcactgcctaccagaatgacaagatcacacagctgaagatcgacaacaacccgtttgccaagggcttccgggacaccgggaacggccggcgggagaaaaggaagcagctgacgctgccgtctctacgcttgtacgaggagcactgcaaacccgagcgcgatggcgcggagtcagacgcctcgtcgtgcgaccctccccccgcgcgggaaccacccacctccccgggcgcagcgcccagtccgctgcgcctgcaccgggcccgagctgaggagaagtcgtgcgccgcggacagcgacccggagcctgagcggttgagcgaggagcgtgcgggggcgccgctaggccgcagcccggctccagacagcgccagccccactcgcttgaccgaacccgagcgcgcccgggagcggcgtagtcccgagaggggcaaggagccggccgagagcggcggggacggcccgttcggcctgaggagcctggagaacggagcgcgccgaagctcggaggaaggacgaggggcgcaaggaggcgggcgagggcaaggagcagggcctggcgccgctggtggtgcagacagacagtgcgtcccccctgggcgccggacacctgcccggcctggccttttccagccacttgcacgggcagcagttctttgggccgctgggagccggccagccgctcttcctgcaccctggacagttcaccatgggccctggcgccttctccgccatgggcatgggtcacctactggcctcggtggcaggcggcggcaacngccggaggtggccggcccctggaaccgcccgcggggctggacccaggcggggctggggcccgcgggcccgcgcagcaagcaacggccgggccctttccgtttccacctcttcccagaaaatgttgggaatcttcgggggaattccaatggcccatttttgggagggcttcttctccctaccccccaaacctaaccgtggccgacatcaggccggcaacgggccattgtgcttttgccccacaccttatgggctgtcaacctggccgccctgtgcggatagcggcgggggttctcttttctcgaagaattgccctatgtgtgggga

SEQ ID NO: 8338 - DNA, 1428 bp, Homo sapiens
  misc_feature (1316)..(1369): n is a, c, g, or t
  misc_feature (1422)..(1426): n is a, c, g, or t
agcggctgctcagccgcagcggaggtgaaggacgtccttccccaggagccgactggccaatcacaggcaggaagatgaaggttctgtgggctgcgttgctggtcacattcctggcaggatgccaggccaaggtggagcaagcggtggagacagagccggagcccgagctgcgccagcagaccgagtggcagagcggccagcgctgggaactggcactgggtcgcttttgggattacctgcgctgggtgcagacactgtctgagcaggtgcaggaggagctgctcagctcccaggtcacccaggaactgagggcgctgatggacgagaccatgaaggagttgaaggcctacaaatcggaactggaggaacaactgaccccggtggcggaggagacgcgggcacggctgtccaaggagctgcaggcggcgcaggcccggctgggcgcggacatggaggacgtgtgcggccgcctggtgcagtaccgcggcgaggtgcaggccatgctcggccagagcaccgaggagctgcgggtgcgcctcgcctcccacctgcgcaagctgcgtaagcggctcctccgcgatgccgatgacctgcagaagcgcctggcagtgtaccaggccggggcccgcgagggcgccgagcgcggcctcagcgccatccgcgagcgcctggggcccctggtggaacagggccgcgtgcgggccgccactgtgggctccctggccggccagccgctacaggagcgggcccaggcctggggcgagcggctgcgcgcgcggatggaggagatgggcagccggacccgcgaccgcctggacgaggtgaaggagcaggtggcggaggtgcgcgccaagctggaggagcaggcccagcagatacgcctgcaggccgaggccttccaggcccgcctcaagagctggttcgagcccctggtggaagacatgcagcgccagtgggccgggctggtggagaaggtgcaggctgccgtgggcaccagcgccgcccctgtgcccagcgacaatcactgaacgccgaagcctgcagccatgcgaccccacgccaccccgtgcctcctgcctccgcgcagcctgcagcgggagaccctgtccccgccccagccgtcctcctggggtggaccctagtttaataaagattcaccaagtttcacgcaaaaaaaaaaaaaaaaaaaaaaaaaaaaaaaaaaaaaaaaaaaacgggggcgggaaagcgtttttaatggcctgggcatagggtttcctgaccattttttttcagggggactggcgccccaaggggggcgataatgatgcggtcgnnnnnnnnnnnnnnnnnnnnnnnnnnnnnnnnnnnnnnnnnnnnnnnnnnnnnngtcacctgttggtgaatgcaatgtgagcgtatatttttgtcccgtattttttnnnnngt

SEQ ID NO: 8339 - DNA, 561 bp, Homo sapiens
tttaaaacattaacttttagaaaaacaagtaggctgactttttcctatttttctacacaggtaggaaatatgtgccccgagcagtcttggtggacctagaacctgggacgatggacagcattcgatctagcaaattaggagctctctttcaacccgacagttttgtccatggtatgtttttccagaaggttccaccatggaggagggggggatgctttactggtgcccttctcttttcacctttcttcccctgctggtttctctttttggccacaggtaactctggggctggcaacaaactgggccaaaggccactacacggagggagccgagctgatcgagaatgtcctagaggtggtgaggcacgagagtgagagctgtgactgcctgcagggcttccagatcgtccactccctgggcgggggcacaggctccgggatgggcactctgctcatgaacaagattagagaggagtacccggaccggatcatgaattccttcagcgtcatgccttctcccaaggtgtcggacacggtggtggagccctacaacgcggttctg

SEQ ID NO: 8340 - DNA, 9509 bp, Homo sapiens
  misc_feature (3118)..(3132): n is a, c, g, or t
  misc_feature (3370)..(3471): n is a, c, g, or t
  misc_feature (3883)..(3904): n is a, c, g, or t
  misc_feature (3940)..(4000): n is a, c, g, or t
  misc_feature (4902)..(4991): n is a, c, g, or t
  misc_feature (5537)..(5567): n is a, c, g, or t
caggaaagggaagaacctccggggttaggcgtattctagattgacgccttttgctggaagagcgctgctggggttaggattctgcgcggcgaggcaagatgctcaagtccaagacgttcttaaaaaagacccgggcgggcggcgtgatgaagatcgtgcgcgagcactacctgcgagacgacatcggctgcggtgcgcccgggtgcgcagcgtgtggaggggcgcacgaggggccggccctggagccgcagccccaggacccggcgagcagcgtctgcccgcaaccgcactacttgctgcccgacactaatgtgttactgcaccagattgatgttcttgaggaccctgccatcaggaatgtaattgtgctacaaacagttcttcaagaagtgagaaatcgcagtgcccccgtatataaacgcatccgagatgtgactaataaccaagagaagcatttctatactttcactaatgagcaccatagagaaacctatgtagaacaagaacagggagaaaatgctaatgacaggaatgatagagcgattcgagtagcagcaaaatggtacaatgaacatttgaaaaaaatgtcagcagacaaccagctgcaagttatcttcataacaaatgacaggagaaacaaagagaaagccatagaagaaggaataccagctttcacttgtgaagaatatgtaaagagcctaactgctaaccccgaactcatagatcgtcttgcttgtttgtctgaagaagggaatgaaatagaaagtggaaaaataatattttcagagcatcttcccttaagtaagctacagcaaggcataaaatctggtacataccttcaaggaacatttagagctagcagggaaaattacttggaagctacagtatggattcatggcgacagtgaagaaaataaagagataatcttacagggacttaaacatttaaacagagctgttcacgaagatattgtggctgtggagcttctccccaagagtcagtgggtagcaccatcttctgtggttttacatgatgaaggtcaaaatgaagaagatgtggagaaagaagaagagacagaacgaatgcttaagactgctgtaagcgagaaaatgttgaagcctacaggtagagttgtaggaataataaaaaggaattggagaccatattgtggcatgctttccaagtctgacattaaggagtcaagaagacatctctttacacctgctgataagagaatccctcgaattcgcatagaaaccagacaggcttccacattagaaggacggagaattattgttgctattgatggttggcccagaaattccagatatccaaatggacactttgtgagaaatttaggtgatgttggagagaaagagactgaaacagaagttttgttacttgaacacgatgttccccatcagcctttttcacaggctgttcttagttttctgccaaagatgccctggagcattactgaaaaggacatgaaaaaccgagaagacctgaggcatctgtgtatttgtagtgtagacccaccaggatgtactgatatagacgatgctctacattgtcgagaactcgaaaatggaaatttggaggttggtgttcatattgctgatgtgagccattttattaggccaggaaatgccttggatcaagaatcagccagaagaggaacaactgtgtatctttgtgaaaagaggattgacatggttccagagttgcttagctctaacttgtgttccttaaaatgtgacgtggacaggctggcattttcatgtatttgggaaatgaatcacaatgctgaaatcttaaaaacgaagtttaccaaaagtgttattaattcaaaggcatctctgacatatgctgaagctcagttgagaattgattcagcaaacatgaatgatgatattaccactagtctccgtggactgaataaactagccaaaattctgaagaaaagaaggattgaaaaaggggctttgactctatcctctcctgaagttcgattccacatggacagtgaaactcacgatcctatagatctgcagaccaaggaacttagggaaacaaattccatggttgaagaatttatgttacttgccaatatttctgttgcaaaaaaaattcatgaggaattttctgaacatgctctgcttcgaaaacatcctgctccacctccatcaaattatgaaattcttgttaaggcagccaggtcaaggaatttggaaattaagactgatacagccaagtctttggctgagtctttggatcaggccgaatctcctacttttccatatctaaacactctgttgagaatattagccactcgctgtatgatgcaagctgtgtacttctgttctggaatggataatgattttcatcactatggcttagcgtctccaatatacacacattttacttcacccattagaagatacgcagatgtcattgttcatcggcttttggctgtggctattggggctgactgtacttatccagagttgacagacaaacacaagcttgcagatatatgtaaaaatctaaatttccggcacaaaatggctcaatatgcccaacgtgcatcagtggcttttcatacccagttattcttcaaaagcaaaggaatagtaagtgaagaagcctatattttatttgtaagaaagaatgccattgtggtattaattccaaagtatggtttagaagggacagtcttttttgaagaaaaggacaaaccaaacccacagcttatttatgatgatgagataccctcacttaaaatagaagatacagtgttccatgtatttgataaagttaaagtgaaaatcatgttagactcatctaatcttcaacatcagaagatccgaatgtccctggtagaaccacagataccaggaataagcattcctactgatacttcaaacatggaccttaatggaccaaagaaaaagaagatgaagcttggaaaatagctatattcaacaaaaatcttcaaagactggtttcttttttaaaagaaaaaacttgaaagaacacttctaagcctaagtgtgtgatacagtttgttacttttaagtacattttaataatttcagacatctgcatttttattgannnnnnnnnnnnnnntgacccatcatactactatacttctgggttgaacagaattatttatgcagaataattcaattgaatatccatcacttaaatacagtgacaggacagcaacttcagggatctgtaaagatcatttaaatggagtgctcatctcattgaggagcagattaattttgcgtaagtactttgattatttaatatttgtaagaaaaaactttcattttcctacagaggaaaatagaacaatttnnnnnnnnnnnnnnnnnnnnnnnnnnnnnnnnnnnnnnnnnnnnnnnnnnnnnnnnnnnnnnnnnnnnnnnnnnnnnnnnnnnnnnnnnnnnnnnnnnnnnnctaggtgttctcttactgtctttaaaagcttcctgtattttattagtggtccttgaaaaactgtgaatgtttgggaattggtagaaaggcaaaaagtaggatattttgacctgactggaaagatggttgtgtttttattgccaggtaataagtgtgatcattgttgaacttcagctccagtgtctctccagaataagacattggcattcaaatgtctatatcttgttacttacaaaataaaaaacagataattagtggcttttaaattgtagttatatcagtgtatatacacgaggggaactgtataaagacatactaaagggaacagattaaaataagtattattaataaaatttggtgtgccagactgactacttcccttgctaatcacagagattagtaatgattaaannnnnnnnnnnnnnnnnnnnnngggatagggttgccttaaaacattttacttggcttnnnnnnnnnnnnnnnnnnnnnnnnnnnnnnnnnnnnnnnnnnnnnnnnnnnnnnnnnnnnncaaggagcttgcagtatagtgagaaaagcctgccaagtaaatcagcaggtatactaaataggtagtcatttaggcactcaataaatgttgactaatttttccagtttcctattactgaggaaaacctccatacactgaggcagaaacttgtgtcagttggaggaaaatagacttgagtagtctttggtccaggtaaaatgggtcagtagacactgaaacagtagagtaggagtcaaaaagccttttctgtgaagtgctagaacattttagactttgttggctatggtctgtattgcaactatagtacacaactctgccgttgatagtgtgtaaggagccatatacaatatgtaaacaaatcaacatgactgtgtttcaacaaggcctgatttgttaagtttcatatatagtcatatgtcacttaatgacagggatatgttctgagacatgtcacttggcaatttcatcattgtgtgaaaatcatgatgtagttacacaaacctagatggtataccctatggtatcctatatgggatagcctattgctcctaacctacaaacctgtatggcatattactgtactgattactgtaggcagttgtaacacagtgctaagtatttgtgtatctaaacatatctaaacatagaaaaggtacagtaaaaatatatatatagatatatataagatataaaatggtacacctatttaggacatttaccatgaacaagttggcaggactggaagctggctctgggtgagtcagtaagtggttagtgaatgtgaaggccatgatattactgtgcactactgtagacttttataaacactatatacttaggctacataaagtaatttcactatgatgttaccatggctgtgtccgcaggcaataggaattttnnnnnnnnnnnnnnnnnnnnnnnnnnnnnnnnnnnnnnnnnnnnnnnnnnnnnnnnnnnnnnnnnnnnnnnnnnnnnnnnnnnnnnnnnngtcacaaaacattactcatttgatttcccccacccccgccaaccatttaaaaaagtttgccggctaggtgcggtggctcatgcctgtaatcctagcattttgggaggacgaggcgggtggatcactcgatgtcaggagtttgagaccagcctggccaacatggtaaaacgccgtctctactaaaaatacaaaaacttagctgggtgtaacggcggatgcctgtaatcccagctacttgggaggctgaggcaggagaatcgcttgaacctgggaggcggaagttgcagtgagccgagattgcaccactgcagttcagcctggatgatgagagtgagactccatcgcaaaaaaaaaaaaaaaaaaaagaaaagaaaattagccaggtgtggtggcaagtgcctttaatcccacctcaggaggctgaggcaggagaatcgcttgaacctgggaggcagaggttgcagtgagccaagatcgcgccactgcactccagcctgggtgacagaacaagactgtctcaaaaaaaaaaaaaaagaagaaaaactnnnnnnnnnnnnnnnnnnnnnnnnnnnnnnnaagaaagggaagtagggcagtgcatgactggccttaggttttttctttccaagtttattttcttgtgcttcagctactagaaaggtttaattcagggataagtcccaattgagtagttcaagatgatcagagactttgctattttcccctaagttctattccataatctaaaatgttctgtttctagtgccagttcttatgctaagcaggttacgtggaatatatcacttaactcaaaaagccctgttaagccaggactgttatctccatttaacagatgagaaaatggaggtttatggtctgttctcacactgctacgaagaaataccccaaactgggtaattattataaaggaaagaggtttaatggactcagttccgcattgctggtgaggcctcaggacacttatacaatcatggcagaaaaaggagaagcaggcacctttttcacagggcggcaggatgaaaatgactgccagcagtggaaatgccagacgcttataaaaccttcagatctcatgagaccggctcactatcacaggaacagcatggaggaaaccgcccccatgatccagttacctccacctggtcccacccttgacacgtggggattgctacaattcaaggttagatttgggtgaggacacagagccataccatatcagcccagatcaagtagtgacagagtagggatttgaatacaggttatagtcactattgtgttatttcttgacttttgtactattaaaaaactgtagccagtgaggcttctacccttagtacccagaactccttttaggtatagcaattgtttttaggtaaatttatattgagtttaacacctgtgtgattaaagacaactttccaatgtagtatctgtagccatgtcccctaatggctattagtgttcatggttagtgtgttgaagatgagccaggtacataacgcggcacattttctgcaggtcagcagtaaggtttcaaggtacagttatggaggaaagaagaaaattgacacattgataacacaggtctttattcccttttgaatgagacagtttttaaaagttgatttataaatacaaaaatacattctccaaagatagtatttccaaactgttatatacccatctactcccaacatggatataagttttttaaaaaaatagttgtatataacatacatatctgccccagtgttacttcacaggcctatgccctacgggaactccactctcccagccccactttttctcttggttctcccacattcttattctcccacatccctacccacgtttgagctggaaaggatgtccctaccctaggcatgaggtatattttattctgggcaccacacatttgccccatagataacaatacacgtgatgatgtcactagtactacctttctagtatttacatacttaaaagtagtaactagaacagttatcactggaactaagaattttccccacagaggtgaacagaccaagaactaaaatttcaggaaacctgtttaatttcttttgtatctttgaaaagttagttttatatctaagatttcttcacataggttataattcatctgtatgttcaagcttttatgtaaaaatatatagtgccttcagttttaacatagtttcacatgttctcagaactgctaaattcagtgctaccagtaaggcttaataagtagttcattgaccctgtaagataggagcactcagctctgtcacaatttgttgttaaacacatcactcaatgtaagtataaaaatatttattgataaaaaataaacttataattcagcaacttgaagttccaggagcatttctgttgttcctatgtcagtaagcccttgatttttcacattaaggagggaaagctaagcatgttacttgaagtaattttttcccagtcaccatcatgttgatcctgtgcacaacgatatatgcgaggaactcttaagcttagtctttgattctgacagaggtattctatggactgctgcattgaaaagggcttgctgttttcatccaacacctctgtgttgtgtggtcttgcttcatattaaatgcttgagatttactctcaacttcacatgtttgtgcatcactttctttgcagtaactttctgccccaactgtatccataatattgcttccacaattctgcgtattatagccactatccatctgaatgttactgctttcacaaggaatgacactgctttcagcaagaggtgacatgcacatatgagagttttcaatactgaaggcaatgccacttacaaaatcagtcatgggtaaactgccattatcaaccggctccttaatccaagtggtctcatctgctatctctataggatcaaccatatccacagtgttattgtctttctccctttcaacatcctgcaacagtgctaattctttctcagaagcactggactgattttgtgtaacagacatggcagtcacaaccaaatgtgtaccatgggtagaagcctcattactaaactgccgtaggtgtattccagcagcatccatggcgggtgatgagacatctgtggaaggaatattctctttatcttcctcatcttcaccttgagtctcaagagtaaaaggtatctgaatcactgaggtccgatactgagtaccaccactatacatctgaagtctcataggagaccaatttttaattggcgagcagccatctatataaggacttctgatacacggattagttatcccattagaatttgttccagatgaagcatcaggagaatgaacagtaaacttcctttgttctgagagtggagtctctcctatctgaaattcaattggtgagaaagtgggtgaagaaataggcgaaggactagttatgcttcccaagctgtatttttttgcactagcctgaatagggctagaagaaaactgccccgaacttggtgtctgcaaggggctcctacactttacaggagacaaatctattgaataaaacatctctagtgatgtttgaacaccactgtgaggacttccgggagaagccgaaggtaaggagtcggagatgcttccgttcccatctaaaaacagctttcttctgagggatgaagaactgaggtttccaggagattgatctgcaaattcatcagctctaaaatagtcacctaatatattttctaaattaaaatccacaggaagagacagcaatgtctgacaagcagcatcgcttttctcagaatgaatggtcagcttttttccaactggagagtcactatttatgttagtgcatttactggaatgacattgtgaaagctgtttcccttcatgatcagtccaaggagagggtacgatgacatctttagtgaaaaactcttcaatggctttttgtcttttgtcttccacatctttatctattcgagaatgacttaagtataaagcttgacgatgaatatcttctgggtctatttctacaggatttattacagctagttgatcaatagaccatctaaatttccctggagttggtaattttgttgatttaaaaacagaaggactggcgagagtttgttcatggagattagaataatcactaggactttcaaaaggatttaaaacagggatccttcctggagtttctggtgttatttgcatctttgattccttgacatctcccatagcacagagagaaaacggtgcgtacaaaacgaagcccccagtaccgactccagggagctccgggggccaggccagcttccacgaccctcgtgcctctttaactccccgcttccgcgctgtcttgggccaaccagggcacggggcttgtgagcgactagccaatcgtgtcgtcccgccatccgcgaaccagccaatcgcacggaggccgcgtaggaaattcgaatggcaactcctcgctccacgttccgcgcagaggaacgtgcat

SEQ ID NO: 8341 - DNA, 735 bp, Homo sapiens
tttttttttttttacatgacactttaaaagatttattcagaagtttaatatattcacaaggtacaaactttaaagttacaaaaaaggcatagagtgaaaagtctaccccagttccctggtcactcatttttgctccagccactcacttctgctctttgtaagcgatagtcttgccagtgtcttgtgtctctttccagagactatgtagaagcaaataattttttatttaaaaatgtttatatttgaataggtgatacatatagatggcaagaaaattcaaaagggcaggcagtgaaaattttcttcgctcacccacagttccccagtttctgtgtttccctctgcagagacagtcatcctttcttatatatccttctggatgttgtaagtgattgtagagcatctctgtggaaataaatggttaagtcggtttgaagcaaagcccttctggggcagaaaagcctccagaacgccagatgtcgctgtggttccgcggtgagagagggcgtgcgtctctgtggttataaagttgggggtggagtggccgggagatgatggctgatgaagaggaagaagtcaagccgatcttgcagaaattgcaggtggggccgtagattaaattctgtatgtgtttttgttactccgaatgaagcagggagtccagtttatgtactgcccgtgaattcctcggcacacacgcgaagctgcgtgcgtctgtgtggttagtataacaga

SEQ ID NO: 8342 - DNA, 1631 bp, Homo sapiens; identical to SEQ ID NO: 6688

SEQ ID NO: 8343 - DNA, 1235 bp, Homo sapiens
ggggaggcttgcggccgcctggggaccagctccgcgcctcggcctctccgccccctccccagcctttctctcgccctcttctcccacactcccggccggcgcctcggctttgtgcgaggagatggtgtagccccctggccgccgaaggaggagccggacacttgtctcccgtctccgagctgctccccacccctggaggagagacccccccctcggctcggcgccttctgcgtctcccggctggtggggaagcctctgcgccgccggcaccatgagtgaacagagtatctgtcaggcaagagctgctgtgatggtttatgatgatgccaataagaagtgggtgccagctggtggctcaactggattcagcagagttcatatctatcaccatacaggcaacaacacattcagagtggtgggcaggaagattcaggaccatcaggtcgtgataaactgtgccattcctaaagggttgaagtacaatcaagctacacagaccttccaccagtggcgagatgctagacaggtgtatggtctcaactttggcagcaaagaggatgccaatgtcttcgcaagtgccatgatgcatgccttagaagtgttaaattcacaggaaacagggccaacattgcctagacaaaactcacaactacctgctcaagttcaaaatggcccatcccaagaagaatggaaattcaaagaagacaactacaagaacagcaacggcaaaaggagctggagcgggaaaggctggagcgagaaagaatggaaagagaaaggttggagagagagaggttagaaagggaaaggctggagagggagcgactggaacaagaacagctggagagagagagacaagaacgggaacggcaggaacgcctggagcggcaggaacgcctggagcggcaggaacgcctggatcgggagaggcaagaaagacaagaacgagagaggctggagagactggaacgggagaggcaagaaagggagcgacaagagcagttagaaagggaacagctggaatgggagagagagcgcagaatatcaagtgctggtaagaagtttacaaactcttctgtgttcttgtatctgagcttggatgatgtctcttgtgcagtcatgtgttaaaatatttcacatttgagatgtttgggattaagccatacaatttgaaattatgaataaatatgcagcaattactactttaaaaaaaaaaaaaaaaaagaagagggcga

SEQ ID NO: 8344 - DNA, 1235 bp, Homo sapiens; identical to SEQ ID NO: 8343

SEQ ID NO: 8345 - DNA, 1651 bp, Homo sapiens
  misc_feature (520)..(520): n is a, c, g, or t
  misc_feature (528)..(534): n is a, c, g, or t
agagaaatagagggggcccccaaaaaaaaaccccctggggggggttgggaaattttaaaatccccccaacacaatttaggaaccccctcagggccccgggggataaaaaattttcaaaaaaaaacaaacccccgagaaagagaaaaatttttttaagggagccaaaaacattttgccggtttgttttttacaccactttaaacccctttaaaaaaattttttttatttttccccttgggggctttaaaatctcctggttagggaaatttggcccaaaatttggttccccccccccacgaagataaaagttccctttcccaaagaaatttccccaaggttagccaattttttccccggtccccggaggttgttaaaaaaagacgggcccaggggcctaaggttataattagggccttcccttttaagggggccctttgtttcaaaagaaaaatgggtaacccgtaaaattgtggcccctctgagggagttattttagaagcgggcgccccttttttttttntttttttnnnnnnnctttttgttgttttcttctgttatgcttgttgctctttttttttttttttccagtgcaacacacatttctattttattatggaaaagggggaaacgccaccttctccacaacagcaaccagtaaaatttatcccaaaaataactcggtacaaaacaggtctgtttcagaattaaaaaaaaaaaaaaagaaaaaaaaaaaaacctttacatgagtttttaaatcctattttaaaacataaaagaaacaaatccatcattggccgcacagccccagccaccgccccccaaccagggagcaagaggagacgcctgggtcctgttccgcacgcggatttgctggtctgtttaactggtgtccattctcgcattataggcgtccagctgggcatccagctcctctgccgaaagctgctgctttgaattcctgccggcacctctgcctcttccacgggcgcctccgcgggtgcctctccgggtgcctccaccaccaccaaaacctccagcgccacggtttctagtcatgccacctctgtttacgctctgtgcaggcctccgctgtgcgtcaatctgtgacgtgacaagctgaatgttcatggggcggccatccagagggacgccgttgtactgcttcatggccttcagggcatctgccttccgctcaatgtgcacgtctgctgttcctaagctgcgaccagagcgatcatagtgcacagccgccttcttcagcgttccaaattcagcaaagagttcctgaatatcggcgtctgagactccaaaatccagattggacaccagcagtttcccacctgtctccacgccggcaccaccgccgaagccactgtcgaaaagatcgtgctgccacttgtcgggaagttgttttggcctgctgtagggcgccggtcggttcctgccgcctccgccggccgcgccgcgggcgatggccggccggttccggatgggcccgccgcctcgattcactcgcgcggcggcctgcgccccaccgccgcggccgcaactgggagccggcacacggcacgcaggccccggcacccgccccagccgcctcgctggctccggttcagtttaatgatgtccagtcaagagacatgtccatttg

SEQ ID NO: 8346 - DNA, 2338 bp, Homo sapiens
ttcgtgaaaaggctaaggcgtatgtcacctgcctactttaggaatgcttgaggtccggtactgtgggggtctaagggtctggttaaaagtctaaaagcactaagctgggtacgcggacaatacagctaaaatcttccctgtcctctagtggtacgcggatctgacgcctgacgtaattgtgtagacgccattttagccggtcagacaagcactggacgtggcggcgattttgttttggacaccgagcaggagctggcggccgctgcagacgaaaggcaggaaagggcaggccgggtgagcagacggatcggccgactagacagccaaccagcaacaacgaactgagctcgcatactaccgcttacgcatctaaccaaccgcccatctagctaacccgagcccctccaccgtcaactcaggttcggccggtccccggcccgcctgccggagccgtggtggcagccccgggaggagcactggcgtctgtttccttcgattctcgggattcgaagatggctgcacagtcagcgccgaaagttgtgctaaaaagcaccaccaagatgtctctaaatgagcgctttactaatatgctgaagaacaaacagccgacgccagtgaatattcgggcttcgatgcagcaacaacagcagctagccagtgccagaaacagaagactggcccagcagatggagaatagaccctctgtccaggcagcattaaaacttaagcagagcttaaagcagcgcctgggtaagagtaacatccaggcacggttaggccgacccataggggccctggccaggggagcaatcggaggacgaggcctacccataatccagagaggcttgcccagaggaggactacgtgggggacgtgccaccagaaccctacttaggggcgggatgtcactccgaggtcaaaacctgctccgaggtggacgagccgtagctccccgaatgggcttaagaagaggtggtgttcgaggtcgtggaggtcctgggagagggggcctagggcgtggagctatgggtcgtggcggaatcggtggtagagggtcggggtatgataggtcggggaagagggggctttggaggccgaggccgagggcgtggacgagggagaggtgcccttgctcgccctgtattgaccaaggagcagctggacaaccaattggatgcatatatgtcgaaaacaaaaggacacctggatgctgagttggatgcctacatggcgcagacagatcccgaaaccaatgattgaagcctgcccatcctcccatgagagactcttgttagtcaacacatctgtaaataaccttgagataacagatgagaagaaatctgattgatgctggatggacctatcacaataggctgtggacttacttgccaccagcttgtgcatttagtgtgttccttttactttttgatactgtgttgtatgaaacccttttgtcctttgatttggtttttgtttttgtttttttaggggggagggggggtttccctcctttgcccagacttctctttgaacacaaatgcattagccttgtggctagaacaccctcttcctacctctgtctcccctcacttgtcatatgctctgacatgctaacatttcttttgttcatccctgttgcccccacagaaacatcccagaaaaaccggtcagtgttccttcctccctgatccttaggtttctgaaatagggttctgttacatcctcttcgatagcctgtttaaaatgtttagaaggtctggagctcaaaaatgcgttcttccacattgataatttagtaaactgagaacattgacatcactacagggcagcataagaggttgcttacatgtggtagcagctctggtttgattcaagttgctaccatgtacattgacagcacatataccataaccagcgtgttgggttgaattgcactttctacctttgtatgagatttacagactttccttctgggtttgtatcatgaccagaggggtactatagggttggtttatactgcaatatagaggatcagaagccatttgatttggtaggtgtgtcagaagggagaatgatggcagacgaactgctggaagaggtcagaagatagccatgctaaaatgcaattatatcctcatgtttatcccaaactaatcttggacttttccactcattagctttgttttgcccttgtttcccttgaaggtttaagttcaaccatattctgtcaactgttcagtttcagtggaatcttgtatttctggttcattataacaaattgttcgcttaaatccaaaaaaaaaaaaaaaaaaaaaaaaaaaaaaaatcgtatcgatgt

SEQ ID NO: 8347 - DNA, 2012 bp, Homo sapiens
aaatggtgaaagggggggaggggagaaaagaaaaaaaaaaaaagaaaggggaaaggggggaaaaataagaaaaagcgagacagaggcgctgccgcgtccgctcgcggggaaggctggggtcggccgggtgctaggccggggccgaggccgaggccggggcgggatccagagcgggagccggcgcgggatctgggactcggagcgggatccggagcgggacccaggagccggcgcggggccatggcgaggcgcgggccagggtggcggccgcttctgctgctcgtgctgctggcgggcgcggcgcagggcggcctctacttccgccggggacagacctgctaccggcctctgcggggggacgggctggctccgctggggcgcagcacatacccccggcctcatgagtacctgtccccagcggatctgcccaagagctgggactggcgcaatgtggatggtgtcaactatgccagcatcacccggaaccagcacatcccccaatactgcggctcctgctgggcccacgccagcaccagcgctatggcggatcggatcaacatcaagaggaagggagcgtggccctccaccctcctgtccgtgcagaacgtcatcgactgcggtaacgctggctcctgtgaagggggtaatgacctgtccgtgtgggactacgcccaccagcacggcatccctgacgagacctgcaacaactaccaggccaaggaccaggagtgtgacaagtttaaccaatgtgggacatgcaatgaattcaaagagtgccacgccatccggaactacaccctctggagggtgggagactacggctccctctctgggagggagaagatgatggcagaaatctacgcaaatggtcccatcagctgtggaataatggcaacagaaagactggctaactacaccggaggcatctatgccgaataccaggacaccacatatataaaccatgtcgtttccgtggctgggtggggcatcagtgatgggactgagtactggattgtccggaattcatggggtgaaccatggggcgagagaggctggctgaggatcgtgaccagcacctataaggatgggaagggcgccagatacaaccttgccatcgaggagcactgtacatttggggaccccatcgtttaaggccatgtcactagaagcgcagtttaagaaaaggcatggtgacccatgaccagaggggatcctatggttatgtgtgccaggctggctggcaggaactggggtggctatcaatattggatggcgaggacagcgtggtactggctgcgagtgttcctgagagttgaaagtgggatgacttatgacacttgcacagcatggctctgcctcacaatgatgcagtcagccacctggtgaagaagtgacctgcgacacaggaaacgatgggacctcagtcttcttcagcagaggacttgatattttgtatttggcaactgtgggcaataatatggcatttaagaggtgaaagagttcagacttatcaccattcttatgtcactttagaatcaagggtgggggagggagggagggagttggcagtttcaaatcgcccaagtgatgaataaagtatctggctctgcacggagaaaaaaaaaaaaaaaataaaaacttattaaatagtataaataagtataacacaaacataccaccgggtgtggcgcagcccttacaaaatgttatctcccttcgtatgggggcccccatgtgttagcgttgtcacccaagtttttctgtagacacaagaggtgggcccccaaaaataggtggccgcgcaattactatcgacccaccataacgaccccatggccgcgactgagataataaacaataagtccatgcaccacttgtcaaaaaatctacgcaatcatgggagacgactccacgttggaaaaaggaaacctcttaccgtatctaggcgctaggaaggcacctatgtgcgcgccgaagcattaccccataccgagaatatttacacacctaca

SEQ ID NO: 8348 - DNA, 1328 bp, Homo sapiens
ggaggctcgccctaccctgcctcgccgctgctgggccgccccctctactacacgtcgcccttctacggcaactacacaaactacgggaacttgaacgcggcgctgcagggccagggtctcctgcggtacaactctgcggccgcggcccccggcgaggccctgcacaccgcgccaaaggcggccagcgacgcgggcaaggcgggcgcgcacccgctcgagtcccactaccggtccccgggcggcggctacgagcccaagaaagatgccagcgagggctgcaccgtggttggcgggggcgtccagccctacctatagaagggccgagcacagcaatgcaagtaagtgggcaccctggtgcttcccagaccctgtggagcctcccagcaccaacttgcttaatgtgtttttcttgcttctggtcatggggttagaagacagagcatttcaatcttgtccagcttttctttccttaagggggaaactatattttctgttttatagattccctctttttggcacaagttctatcactcctttacctagggaaggaaaaaaaaatatatatatatatgtgtgtgtgtgtgtgtgtaatatatatatgtatatatatagtacatgtatatatatagtacatgtgtatatatatattacacactactgttgttttcttttgaaacaatagattattaaaatctgggcatttatatgcaatttagagccatttttactatgctagacacataatagacacatgctttgatgagcttgggctaccaaaacttggagtagcaaaaacctttatagatgatgtttgcaaaataagactgaagagacacgaggcgtactagtcttttatcagccctgcccaacctcccctccacccatgtccaagtggacaggactctgacattctcccggggctcacaacagtatctcaaaaaatatgttgctttgcaacgagtcagaattactaatcatagatcttgaagataagaaagatttggaaccacttcagatcaactcgtttttataatggtgttgttgtggaactgaaagattggggatgatttggttttttccttggtccacaggtaggtgtcacaattgctttgaaaaaaaaaaaaaaaaaaaaaaggtcagcaggccattctctcttcccaagctcataaatttacagatacaacaaacagatgtctaaatccagaccacatcttgtgccactgtaaaagagaaggatccacacagcactgtcagcccacagactctaacaattggaacagactattgttggacatatgtgaatttgttggcatagtatagtttccccg

SEQ ID NO: 8349 - DNA, 1328 bp, Homo sapiens; identical to SEQ ID NO: 8348

SEQ ID NO: 8350 - DNA, 947 bp, Homo sapiens
tttttttttttttgccacacatacattgccctgagagggtttgaaaaattcactttatctgtgtcatccagaaaaaaggaaacaagttgtgttgtagcagtagaaatctctgttacagcataatttaaatgtgtactgcacatactaaatgtaagttgggttgatttaatgtgggccttcaatatcttttctattatctttcctctcttgccctggaatacaaggaggggaacatgtaatgaaagtaaatctgaactgtcttcctaaagggacatttctggtactttcgaaggtgcagactgaagacttgagtcaaggattgctgctcaccagactggcgagagagcatataaatgtgtttgtgtgtagtgtgcatgtatgtgttgcagtgaaattacagctttccaagtgtatggcattgctttagaagcaatagaaacgttatgctgctgagtgatggatgcacatagaattgtgatatttgaaggaggaggttgctaaccttggctgttctgaactaaacatggtatagggtgtgatgcatactcagagacaggctcatttatctcttgtcctgttcagtgctgcattggttcttataactgtgtttattaaataaaactagaaattgcaatcctataaagaaacatttagctaaggctttcatttcttgtttacttatcagggttgctgtgtcacaacaaactctgtgcataccatctacaatgactgtcatagagttgtgtggtgacccaagttctcttgttccacccttccaccatcgggatttttatgggtaatttgcctgaaattattaactcttagagctctggtacaaaaagtctgttttgttttgttttgttttgtttttgtttttgtttttgagatggagtctcgctccgtcgcctgcacattcctttatcgtcctgaatacacagtaatggacc

SEQ ID NO: 8351 - DNA, 687 bp, Homo sapiens
  misc_feature (355)..(380): n is a, c, g, or t
taaaagatggttagcgacctcgaccacccgcaatctctaatttacaactgatctactttcaccaattacatcttctattacagaccacctctaaacgacttcctgtaaacaaaccactctgctgggttttcttttttttttttttaatttaattaaatccttattttgctctttaactacaagaagctcacttttcgctacattggggcagaattttttttttcaagagacacagaaataatccccaaatagaagcccagaggggtgcacagacagacagactgtgggtctgtctgacctgccttcagcagccacttgctcatctaacacttgccggcctgtgctcacgcaaggnnnnnnnnnnnnnnnnnnnnnnnnnnctggattaagtgaagaaggcagaatgtaaacaggtatgaagttagtgttctggagcacgcaggaaggagtatttaaatctccttggaggtgggcaaggaagatgctgacccttttagagtgtcaggccaagtgtcttgacttctccagactccgcttgaaggtgaccaattcattctagtttgcaaggcccaagttcctagaaacccccttagtcacaggcaaacccagacaaccagtcaccctacctgcatcctgcccaggtcttcttcctaggaggaggaatcatcataatattaagttggcctg

SEQ ID NO: 8352 - DNA, 687 bp, Homo sapiens; identical to SEQ ID NO: 8351
  misc_feature (355)..(380): n is a, c, g, or t

SEQ ID NO: 8353 - DNA, 350 bp, Homo sapiens
aagcttgcggccgcgccgctgggccaggcggagagaggcggacggacttcaggggaggcccgggccacgccgcggaaactacccgactccctggaggcggccaggaccgaccctgtcccgacaaaatggagttccccgtgtggcttcagctcgcggcgcgttcccagagctcctcagtgatccggctttcggattgttcgcctttcatctcatttgccgttgtccaaattctaatttaaaactcatgtgttacttgctgtaaggttaacaaacgtacagcgcaaactgggttaagggataacttttatgttgtgtatgttttaccacaataaaaataaattttgtaaaaa

SEQ ID NO: 8354 - DNA, 4189 bp, Homo sapiens
  misc_feature (898)..(900): n is a, c, g, or t
  misc_feature (903)..(924): n is a, c, g, or t
cctggtgctcttacgcactttcggtttactagtgtgaattgccattttcgtccccatttgcccttcgctccctttaagttgttgtccgggacgactactcttgttgcgtcaggcgtttacagccgggccacccgggaagattgaagaaaaaccagcgtcccatctgagcattcttgtattacatacgaattgtagactgagacttacagagagttgtacttcaagaaataactcagtacaaggtgctaacgtaaaatggtaacatagagttgtgacgacacagttccctgaccagttttcttccttcctggtaaggaacttggtatttaaactaaatctaggtcactgaaattgtgcccatgggaaacatgcaaaatagaggactgcctacaccctacttgtttatattgatccagacaggcttaacgctgactactgaaaaatagcctatctgaatttatatcgaaatagtgaaatcttaaagcacccaagatgaaaaattagggcacactgagatggttttaaaatctttgtcatatgataatcaagcttaaaatgtatcttagagtaacagatttttagaaataaagacctttaaaggctccatagtttggtaccgcagattatccagcatgtttattgtgaattattgcggcggcggcggcgcagtttgctcatactttgtgacttgcggtcacagtggcattcagctccacacttggtagaaccacaggcacgacaagcatagaaacatcctaaacaatcttcatcgaggcatcgaggtccatcccaataaaaatcaggagaccctggctatcatagaccttagtcttcgctggtatactcgctgtctgtcaaccagcggttgactttttttaagccttcttttttctctttnnncannnnnnnnnnnnnnnnnnnnnntttgccttcctggatttgtaaattgtaatgacctcaaaactttagcagttcttccatctgactcaggtttgcttctctggcggtcttcagaatcaacatccacacttccgtgattatctgcgtgcattttggacaaagcttccaaccaggatacgggaagaagaaatggctggtgatctttcagcaggtttcttcatggaggaacttaatacataccgtcagaagcagggagtagtacttaaatatcaagaactgcctaattcaggacctccacatgataggaggtttacatttcaagttataatagatggaagagaatttccagaaggtgaaggtagatcaaagaaggaagcaaaaaatgccgcagccaaattagctgttgagatacttaataaggaaaagaaggcagttagtcctttattattgacaacaacgaattcttcagaaggattatccatggggaattacataggccttatcaatagaattgcccagaagaaaagactaactgtaaattatgaacagtgtgcatcgggggtgcatgggccagaaggatttcattataaatgcaaaatgggacagaaagaatatagtattggtacaggttctactaaacaggaagcaaaacaattggccgctaaacttgcatatcttcagatattatcagaagaaacctcagtgaaatctgactacctgtcctctggttcttttgctactacgtgtgagtcccaaagcaactctttagtgaccagcacactcgcttctgaatcatcatctgaaggtgacttctcagcagatacatcagagataaattctaacagtgacagtttaaacagttcttcgttgcttatgaatggtctcagaaataatcaaaggaaggcaaaaagatctttggcacccagatttgaccttcctgacatgaaagaaacaaagtatactgtggacaagaggtttggcatggattttaaagaaatagaattaattggctcaggtggatttggccaagttttcaaagcaaaacacagaattgacggaaagacttacgttattaaacgtgttaaatataataacgagaaggcggagcgtgaagtaaaagcattggcaaaacttgatcatgtaaatattgttcactacaatggctgttgggatggatttgattatgatcctgagaccagtgatgattctcttgagagcagtgattatgatcctgagaacagcaaaaatagttcaaggtcaaagactaagtgccttttcatccaaatggaattctgtgataaagggaccttggaacaatggattgaaaaaagaagaggcgagaaactagacaaagttttggctttggaactctttgaacaaataacaaaaggggtggattatatacattcaaaaaaattaattcatagagatcttaagccaagtaatatattcttagtagatacaaaacaagtaaagattggagactttggacttgtaacatctctgaaaaatgatggaaagcgaacaaggagtaagggaactttgcgatacatgagcccagaacagatttcttcgcaagactatggaaaggaagtggacctctacgctttggggctaattcttgctgaacttcttcatgtatgtgacactgcttttgaaacatcaaagtttttcacagacctacgggatggcatcatctcagatatatttgataaaaaagaaaaaactcttctacagaaattactctcaaagaaacctgaggatcgacctaacacatctgaaatactaaggaccttgactgtgtggaagaaaagcccagagaaaaatgaacgacacacatgttagagcccttctgaaaaagtatcctgcttctgatatgcagttttccttaaattatctaaaatctgctagggaatatcaatagatatttaccttttattttaatgtttcctttaattttttactatttttactaatctttctgcagaaacagaaaggttttcttctttttgcttcaaaaacattcttacattttactttttcctggctcatctctttattcttttttttttttttaaagacagagtctcgctctgttgcccaggctggagtgcaatgacacagtcttggctcactgcaacttctgcctcttgggttcaagtgattctcctgcctcagcctcctgagtagctggattacaggcatgtgccacccacccaactaatttttgtgtttttaataaagacagggtttcaccatgttggccaggctggtctcaaactcctgacctcaagtaatccacctgcctcggcctcccaaagtgctgggattacagggatgagccaccgcgcccagcctcatctctttgttctaaagatggaaaaaccacccccaaattttctttttatactattaatgaatcaatcaattcatatctatttattaaatttctaccgcttttaggccaaaaaaatgtaagatcgttctctgcctcacatagcttacaagccagctggagaaatatggtactcattaaaaaaaaaaaaaaaaagtgatgtacaaccaatttcggaaaacaatttggcattatctagtaaagttgaatccatgtatacccacatagctatcaattctattcctacatacgtgcttacaagaatgtccataaaaccctgtttataatagccaaaagaacagggaacaaccataatgcacatcaaaagaagaatggattaaaaaaattatattcacacacaggagtactatatagtattgaaaacaattgaagtacagctaaatgtaataacgtaacacaatacaactctcagaaacataatgttaagcgaacaaagcaggttttcagaaaatatatgcagaataattccatttatataaagttccagagcatgcaaaactaaatcattttgtataaaaaacccaacaaatgtgatgagacaataatgggaaggaagggaaatgagaatattaaattctggatggtggttatctttgacggaggggaatgatgtgattggggaaatggactttcaaaggtaaatggtaacttccttaagctggatggtaggtccactaatgtttgctgcataggtatacctttatctttaatacattttgtatctattggaaccacccactttaaagacaaccggggctgtaaaggcagtaccttaaaaacagaaaatagtccatctcgggaaagggtaaaatgggcttttctgctggaacacaagggctaaaaaatgaacaaccccaatggggccccttccca

SEQ ID NO: 8355 - DNA, 564 bp, Homo sapiens
gaatccaatcttgccggggagggtgggattgctgcagagaagtcggcacgtgttaaagctaaaattttcctttgttgcagttttattaaccatagcctatgccatagtgccacctgttgagtgctaccgatgggcattctggctggaagaaccacttgtccatagtgttaatagtgctctctattaatggtgttagattttaaaggtctcacaatgattgaagctcttcagagggtgagtgctccttatctgacatgcttgggaccagaagtgttttggatttgggagtttttttgaattttcaaatatctgcacgtacttactggttgagcaaccctaaactgaaaaatctgaaatccaaaatgctccaacgagatgacctttgagtgccaggtcggtgctcaaaagggttctgattttggagcccttcagattttggatttttggattaggaatggtcaacctgaatagccatactgtaactccaattgctttatttatttatttatttatttactgagacagagtctcgctctattaccaggctggagtgcagtggtgtga

SEQ ID NO: 8356 - DNA, 598 bp, Homo sapiens
aaaggagaaagaaattttacatatgttatacaagttagcactaaagaaaattgtactaacttttcaaaatgaggccagcataaaaataaaataaaaaattcaatataaaacaatatgcttttaatttcatttttctggtaaggatgaaaaatatcagcataatagcagtagcgttcaaaatgatagaaatataacttagttctcaagttactcatttctgagttccctcatagctttgaaattttattgtactattcattgatagtataaattgcaaatataatagggaaaaactttttatcagaaaatgggataattaaactaggtgcagcgactcatgcctgtaatcccagcacattgggaggctgaggcaggaggactgcttgagcccaggagtttgagaccagcctgggcaacatagtgagaccctgtctctacaaaaaatacatttaagaaattagctgggcatcgtctgtacgcatatattcccaggacttgggtggctgaggtgggaggattgcttgagcctgggagatggaggcggcagtaagccgtgatcacaccactcactgcattccacgccgagccctatgcagtc

SEQ ID NO: 8357 - DNA, 485 bp, Homo sapiens
tttttagagacggcaagatgtgtaagttattgaatgtgggtgatgagtatgctgataattggctattctttcacattctttatatgtttgaaagtttttacaataaaaaatttaatttttcaagaaggcttgacagaggctgtgctatttttaaaaaggccttgaaggatgagctctggggctccaagcaaacatggcagaggtcagggcgaagaaacccgcaccatctgagatagggctggtcctttcacttctcaggagttccaggcccccttgacagagtgaccagaagaggagctgaaaaggtcggacagatgcagaagatgaaggcctcccatgtcatctgcgatcttctcgctaggccacagggtaccacatatgcgcctgaacttgaagtttgttgattccttctaagttttgttggcaggacgtgaactcagctattaaattcctagttttccctgtgtattccaaatatagacgtc

SEQ ID NO: 8358 - DNA, 1206 bp, Homo sapiens
ggcctcctcctcgtcggcctcttcggcaggggctctggagtcctcgttggatcgaaaattccagtcggtaaccaacaccatggagtccattcaaggcttgtcgtcttggtgtatagagaacaaaaaacaccacagtactatcgtctatcattggatgaagtggctccggagatctgcatatccccaccgtttgaatctcttttaccttgccaatgatgtcatacagaactgtaaaaggaaaaatgcaatcatattccgtgaatcatttgctgatgtacttcctgaagcagctgctctagtgaaggatccatctgtctctaagtctgtagaacgaatctttaaaatctgggaagatagaaatgtatacccagaagaaatgattgtggcattgagagaagctttgagtaccactttcaaaactcagaagcagctgaaagaaaatctgaacaaacaaccgaataagcagtggaagaaatcacaaacatctacaaatccaaaagctgctctcaagtctaagatagttgctgaatttcgatctcaggccctaattgaagagctgttgctatacaagcgctcagaagatcagatagaactgaaggaaaagcagttgtcaactatgagggtggatgtgtgcagcacagaaactctcaaatgcttaaaagataaaacaggtgggaagaagttctccaaagaatttgaagaggcaagctccaagctggaagaatttgtgaatggattagataagcaggtgaaaaacggaccttcattaacagaagcactggaaaatgctggaattttctatgaagcacaatacaaagaagtcaaagtggtggctaaggcatttaaaccttggttaacgattaaacaatttaagaagaaagtggcattaagtgaaagtcaaccctttacagattcctgaaagaatcacagttcttgccccaagcattgaaggtcctcccgaatggttgagtttacattcaggacatggggtgtgattccatccaacatggagggaattggcactgaagctgaaatccggcgtcgagcctacatctcttcaggcgacactgtcgacaaatagtgaaggagagaactcgaaagaggatcctgacaacaaaaattttaagttacacgtggagacacagaacaactcacaacaaagaaagaccacacacaaaagcttcagcactaccaatagtactccaa

SEQ ID NO: 8359 - DNA, 4690 bp, Homo sapiens
  misc_feature (2211)..(2226): n is a, c, g, or t
tccttgccctccgctctcactctggctgggagcagaaggcagcctcggtctctgggcggcggcggcggccctctctgccctggccgcgctgtgtggtgaccgcaggcccgagacatgagggcggcccgtgctctgctgcccctgctgctgcaggcctgctggacagccgcgcaggatgagccggagaccccgagggccgtggccttccaggactgccccgtggacctgttctttgtgctggacacctctgagagcgtggccctgaggctgaagccctacggggccctcgtggacaaagtcaagtccttcaccaagcgcttcatcgacaacctgagggacaggtactaccgctgtgaccgaaacctggtgtggaacgcaggcgcgctgcactacagtgacgaggtggagatcatccaaggcctcacgcgcatgcctggcggccgcgacgcactcaaaagcagcgtggacgcggtcaagtactttgggaagggcacctacaccgactgcgctatcaagaaggggctggagcagctcctcgtggggggctcccacctgaaggagaataagtacctgattgtggtgaccgacgggcaccccctggagggctacaaggaaccctgtggggggctggaggatgctgtgaacgaggccaagcacctgggcgtcaaagtcttctcggtggccatcacacccgaccacctggagccgcgtctgagcatcatcgccacggaccacacgtaccggcgcaacttcacggcggctgactggggccagagccgcgacgcagaggaggccatcagccagaccatcgacaccatcgtggacatgatcaaaaataacgttgagcaagtgtgctgctccttcgaatgccagcctgcaagaggacctccgggcctccggggcgaccccggctttgagggagaacgaggcaagccggggctcccaggagagaagggagaagccggagatcctggaagacccggggacctcggacctgttgggtaccagggaatgaagggagaaaaagggagccgtggggagaagggctccaggggaccaaagggctacaagggagagaagggcaagcgtggcatcgacggggtggacggcgtgaagggggagatggggtacccaggcctgccaggctgcaagggctcgccgggttttgacggcattcaaggaccccctggccccaagggagaccccggcgcctttggactgaaaggagaaaagggcgagcctggagctgacggggaggccgggagaccaggagctcggggaccatctggagacgaggggccagccggagagcctgggccccccggagagaaaggagaggcgggcgacgaggggaacccaggacctgacggtgcccccggggagcggggtggccctggagagagaggaccacgggggaccccaggcccgcggggaccaagaggagaccctggtgaagctggcccgcagggtgatcagggaagagaagggcccgttggtgtccctggagacccgggcgaggctggccctatcggacctaaaggctaccgaggcgatgagggtcccccagggtccgagggtgccagaggagccccaggacctgccggaccccctggagacccggggctgatgggagaaaggggagaagacggccccgctggaaatggcaccgagggcttccccggcttccccgggtatcccgggaacaggggcgctcccgggataaacggcacgaagggctaccccggcctcaagggggacgagggagaagccggggaccccggagacgataacaacgacattgcaccccgaggagtcaaaggagcaaaggggtaccggggtcccgagggcccccagggacccccaggacaccaaggaccgcctgggccggacgaatgcgagattttggacatcatcatgaaaatgtgctcttgctgtgaatgcaagtgcggccccatcgacctcctgttcgtgctggacagctcagagagcattggcctgcagaacttcgagattgccaaggacttcgtcgtcaaggtcatcgaccggctgagccgggacgagctggtcaagttcgagccagggcagtcgtacgcgggtgtggtgcagtacagccacagccagatgcaggagcacgtgagcctgcgcagccccagcatccggaacgtgcaggagctcaaggaagccatcaagagcctgcagtggatggcgggnnnnnnnnnnnnnnnngaggccctgcagtacacgcgggaccagctgctgccgcccagcccgaacaaccgcatcgccctggtcatcactgacgggcgctcagacactcagagggacaccacaccgctcaacgtgctctgcagccccggcatccaggtggtctccgtgggcatcaaagacgtgtttgacttcatcccaggctcagaccagctcaatgtcatttcttgccaaggcctggcaccatcccagggccggcccggcctctcgctggtcaaggagaactatgcagagctgctggaggatgccttcctgaagaatgtcaccgcccagatctgcatagacaagaagtgtccagattacacctgccccatcacgttctcctccccggctgacatcaccatcctgctggacggctccgccagacgtgggcagccacaactttgacaccaccaagcgcttcgccaagcgcctggccgagcgcttcctcacagcgggcaggacggaccccgcccacgacgtgcgggtggcggtggtgcagtacagcggcacgggccagcagcgcccagagcgggcgtcgctgcagttcctgcagaactacacggccctggccagtgccgtcgatgccatggactttatcaacgacgccaccgacgtcaacgatgccctgggctatgtgacccgcttctaccgcgaggcctcgtccggcgctgccaagaagaggctgctgctcttctcagatggcaactcgcagggcgccacgcccgctgccatcgagaaggccgtgcaggaagcccagcgggcaggcatcgagatcttcgtggtggtcgtgggccgccaggtgaatgagccccacatccgcgtcctggtcaccggcaagacggccgagtacgacgtggcctacggcgagagccacctgttccgtgtccccagctaccaggccctgctccgcggtgtcttccaccagacagtctccaggaaggtggcgctgggctagcccaccctgcacgccggcaccaaaccctgtcctcccacccctccccactcatcactaaacagagcccaagcttggaaagccaggacacaacgctgctgcctgctttgtgcagggtcctccggggctcagccctgagttggcatcacctgcgcagggccctctggggctcagctctgagctagtgtcacctgcacagggccctctgaggctcagccctgagctggcgtcacctgtgcagggccctctggggctcagccctgagctggcctcacctgggttccccaccccgggctctcctgccctgccctcctgcccgccctccctcctgcctgcgcagctccttccctaggcacctctgtgctgcatcccaccagcctgagcaagacgcctctcggggcctgtgccgcactagcctccctctcctctgtccccatagctggtttttcccaccaatcctcacctaacagttactttacaattaaactcaaagcaagctcttctcctcagcttggggcagccattggcctctgtctcgttttgggaaaccaaggtcaggaggccgttgcagacataaatctcggcgactcggccccgtctcctgagggtcctgctggtgaccggcctggaccttggccctacagccctggaggccgctgctgaccagcactgaccccgacctcagagagtactcgcaggggcgctggctgcactcaagaccctcgagattaacggtgctaaccccgtctgctcctccctcccgcagagactggggcctggactggacatgagagccccttggtgccacagagggctgtgtcttactagaaacaacgcaaacctctccttcctcagaatagtgatgtgttcgacgttttatcaaaggccccctttctatgttcatgttagttttgctccttctgtgtttttttctgaaccatatccatgttgctgacttttccaaataaaggttttcactcctcaaaaaaaaaaaaaaaaaaaaaaaaaaaaaaaaaaaaaaaagaaaacaaacagaaggggtgtggcgagcgagcgcacacaagaaaaactcaccgcaggaggaggagggcccccaaaagcatgcaccaccgcacagacgcagcgcaattcgtgcgaggaccaaacaggcgcggagacgccaaactaagggagagacagccctacagcgctccaaacacgagccgcagcaaagcgcgctcgcacggcatccaaacaaaaacagcaggccggacgcacgccggcaacccacccgccgcgcaaacgcggcaggcgagacgacccgtggacgcagaggaacgaccccccacaacaacccgggccggggcgaagcaccacaaccgcggcgcgccaacagacccaacccaacgaaagttgacaagcgcccaccccacggggcaccacatcacaacacacccgctcgacggggaccaaccaggccgctcctcacaacagacgggcaaaaaacggcag

SEQ ID NO: 8360 - DNA, 4743 bp, Homo sapiens
  misc_feature (28)..(62): n is a, c, g, or t
  misc_feature (1582)..(1609): n is a, c, g, or t
  misc_feature (3039)..(3046): n is a, c, g, or t
atagaacaagtttgtacaaaaaagcagnnnnnnnnnnnnnnnnnnnnnnnnnnnnnnnnnnnggcgggacccgtgttctggaggcgactgctgggcctcctgcctggccgcccagggctggccgggctcctgggacgcctgtccgaccgcctcggcaggaaccgggaccgccgagcgcaggaggtcaccatggctgttattggctcccttgctgtgccccagctgttccccaggtcacctccgccagctgtggctgcctgtgtccagaaggcgtgcaccggttccagtggatcagaaacctggttccagaatttggagtctccagttctcacgttagggtgctttgcttccccggcagagttggtgtcgagctcatgaaggggggagataagaggtagccaagaggggggtcgtgatggcatccctctacctggggacaggtcctttggaacaggagctggtggactgcctggaaagtactctagaaaagtcactccaagcaaagtttccttcaaatctcaaggtctccattctcttagacttcacgcggggctcacgaggtcggaagaactcccgcacaatgctgctcccactcctgcggaggttcccagagcaggtccgagtctccctctttcacacgccgcacctccgtgggctgcttcggctcctcatccctgagcgcttcaacgagaccatcggcctccagcacattaaggtgtacctcttcgacaacagcgtcatcttgagcggtgcaaacctgagtgactcctacttcaccaaccgccaggaccgctacgtgttcctgcaggactgtgcggagattgccgacttcttcacggagctggtggacgcggtgggggatgtgtccctgcagctgcagggggacgacacggtgcaggtggtggatgggatggtgcatccttacaaaggggaccgggccgagtactgcaaggcagccaataagagggtcatggatgtgatcaactcagccaggacccgccagcagatgctgcatgcccagaccttccacagcaactctcttttgacccaggaagatgcagcagctgctggggatcgcagaccagcccctgacacctggatttatccgctgattcagatgaagcccttcgagattcaaatcgatgagattgtcactgagaccctgttgactgaggcggagcgcggggcaaaggtctacctcaccactggctatttcaacctgacccaggcctacatggacctggtcttgggcactcgggctgagtaccagatcctgctggcctcaccagaggtgaatggcttctttggggccaagggggtggccggcgccatcccagcggcctatgtgcacatcgagcgacagttcttcagtgaggtgtgcagcctgggacagcaggagcgggtccagcttcaggagtactggcggaggggctggacgttccacgccaaaggcctctggctgtacctggcagggagcagcctgccctgtctcacgctgattggctctcctaattttgggtacaggtcagttcaccgggacctggaggcccagattgcgatcgtgacggagaaccaggccctnnnnnnnnnnnnnnnnnnnnnnnnnnnngagcagctctacctgaggtcaggtgtggtgtcctctgccaccttcgagcagccgagtcgccaggtgaagctgtgggtgaagatggtgactccactgatcaagaacttcttctgaggacagacaggtgctgtctctagcatcacctctcagcacgattttcccgagagttcacaggtggggcaggtggttgttctgactcaaccagagcttccagagggctctttgatccctttctcagttaaacacagagcagcatcttcaggggtatggcagctgtcctcaaagttagaagctggatgctaaattaggcagtctgttcactttccatctggtacccactccactaagtcccaaggcgcctgtgctggggtcggcagtggcagcctgtagtccccttctgctctcccttcccggggggtcctgaagaagccctggggcaagggctcagggatgagggggcagaaaggcagattgagcccctccaagctgagcacactggtgcaggagatgtagacgtgggaggaggggagcacgtttgctcgtgagagtggctctggcttgctgccctggccggctgtagtgcacagggtggggcgtcggtagagccagaccgtgggctgctgcctggacgcctcgctgacatccctgtgctgcggttacagagctgcgcccttctagactctggaagttgagtaacaggacctgctctgcccacccaggaggggcctgccgcttcaccagaggcaccagtggggtcccacagtcacctgaggtacccctggactgtcttgacgcctagaggtccgggcagggggtggctgccattaaaggtggggtctttgctgagtgaccttttgtgtcctggatccctcagggcctggactgcactccgggtggggtcaggctcccgaggcccctgctctctggttctggatgttgtgggtagttctgttgctttggatggctgggcctttggatggtggcttgtggggaagggacggtgaggagtcaaagatgagccaggacccatgtggccggcacatgcgctagtgccggcatctcatgtgtgcagcgtgggctcccttagtgcctggcaccttagtgctctgctaagtctcattgtttaaaaatgtgtagtttatctgcagcttttcctagttattttaattacttttcattttatttgaatagtatgtgcaaatgtagagagtaaaacaatactgcggccatttcctgccctcccttcccccaggcagccactcttggcttgtttcttctgatgtgcacacgtgtccgtatttctaaataacgtgcatatcctgctgtcttcccccaaaatgtgtacttaaccaaaacagcaccagtgtcactcctgaaacaaaaattaccaagaatgtcttagtatcatcaaatacctaaatggtgttcannnnnnnncttgccttaaaattaattttttcgattatttgacttgaagtccaattaaggactacaccttgtgattgttttttccctagcaatttattttttgaagaatgaactttatttttattggatctacttaaaacatttttgtgtcacctagtagcaggggattttgaatacatgtcatgtgtgtttataaagccagctctccatatcccccagtgtctccaggagctgcttttgtgacctcactgcctgatctctttatcatcttcaggtgcttgacccttgcacagagaagcttcctgggctacagggcatggcagcctgtcctttcggggagtgagattagatttagtccctgcactttgcctctctagaagcagcttctcgcctttccctcccgagggctggcaggagtcactgtcagtcacccttcatggggtctgaaaggttgcatgggctcacctggtcttagacaaggacagttgcagcttccgcaccaggcagacctgcagtttgagtggctggggataggtggagcggcggcctggccacagtgccctggacagcagcacatcacatcagttaacactgtttgccttccaactagttattacggtgtcctgtgggacaattagactggaggagccaaaggaatgtgcaggggcactgggtttctgtttggagagaggctctcggtaaacagagttcgcattcctccagattctgtgggaccagagtaaatatcattatgccacagccaggcttaagcaatctatctgcagtgccgttcccgcagcgcacactgctccctctgtctctgccgatgaccttcgaggctgtcctaggcaggttctccctgaggagctccccacaccaagcctccctaactctgcaaagcagccggagcaacagagagcagcgggcggcgggcggccgccgcagtcctcccggctttctaggtgcgcggggctgtcgtgttccagtccgtgttccccgtcgctggagtgcagcttaagtgcgaatcatttcttggaaagtttagagataattttgtcaactacccacaatatgtatgtgtggactagattactttcttatttcaggatctaaaggcaaaatggaaaaacgtcacattttgtggttattaccagggactgaagtgagttgcccggtggcccctggtggctttagctcccctggtcacctgaagggctgcagtgacccctcctgggccagcagaggtattggcccagccaggctgggggaggctgaaactgcttcccttctctgcagccacaaagggctggattccttgggcgccaggaggggaggatttttcttttccctccgatagccctactgggcgctaagattgttgtgaatcattaccctcagaatttggactttctagatgcttcttaacccatgatttaggtgagtaaacttggaaaaatgtttttgcaaaacttgatgatcaagctgaacgtagaacgatattcctaatgggtgtgtttgccttttttcccccttttgagacagggtctcactctgtcacccaggctggagtgagtggcatgatcatgcctcgctgcgtacttgagcccaggaggtggaggttgcaacgtgagccgagattgcgtcattgcactccagcctgggcgacaagagtgaaactctcactctccctcgaaaaaaaaaaaaac

SEQ ID NO: 8361 - DNA, 507 bp, Homo sapiens
tttttttttttttttcataaaatattgtttttatttttttaattagtaaataaggtcatgacagattttactcagagtgaaggcctactatgctgacaattatccctaaccatctttctctgccaaattctttactttccttaacccaaaaacaagctcctcccttttccaaccagctgctataagatttggttgtggaaaggaggaaacagaaagcaaaaaggggagtggggtaaaggatgctggggaaagggggagcagacagaaccctttgtgccagctcagaactgggaaaggacattacattcaccaatggcagattctcagcctcacccccccgttcatcctcctgaactctaggttttgaggagacacagaattgggtcttctttaacatcacctcttctctaataggtctttttcatcagacatcagaaggagacttggacgatttggctcaggatttaaaggacttgtaccataccccatcttttctgaacttttatc

SEQ ID NO: 8362 - DNA, 1356 bp, Homo sapiens
ggcagccgagagccgggggttgagccggaagaaggaggaggcccttcaggccctgtcacaggaacggagccggctgctcgagctcaattgccttcagggaacacctggcggggacttctctgagcccaacccggccctcactaagctgctgttcacccagaagacagaccgccagctgctggtgctccaggatgccgtggcccactccgctgccacccctacttcttcctgcctcttttctgtccacagctccctgcagggctccattggcctccagaggactgggagcctgccccggaaaaggggggagagggggagccagagaggatccccccgacctctgtccttccattgtagaatccctggaggcctcagctctcccgccagcagtgggggactccggcagataccccctctaccagctgctgaactgtggccgtgggaatagctgtggggccatccatccagacattgcccacatggagcggcacgaggcagcaggtcatggcggagagggagcggctgctcaaggcccgggaaggaacaagaaggggcacggaaggttcctcaggccctgctgttcctgccatcacggccccgcccaccccaccccaccctccaggcccgcgaatcttggatctccggcagcatctggagggatggggccacaacccggaaaactgcccacatgtgcaggtgtctgggtgctgctgccgtggacccctggtgaagatgggcggccgcatcaagacctggaggaagcgatggttctgctttgaccgccaagcccgccgcttggcctactatgcggacaaggaagagaccaagctcaaaggtgtcatctacttccaggccattgaggaagtctattatgaccacttacgctgtgccttcaagagccccaacccccgcctgaccttctgcgtcaaaacctacgaacgccttttctacatggtggctccgagccccgaagccatgcgcatttggatggacgtcatcgtgacagccgctgacgaaaaccacgccccctgagtggccccgccctcttggggggaagtcccttcgaggctccgccggcgcggggcgcgggggcgttcctaggccccgcccactgccggaaaacttggacgcaccgctttggaactctcccgggagttccgcaggcgcggcagttcagctggcctgagctgctgcgttctgggttgcaggtgccttgcccccgacgggatcgccggcccctaaggctctgcccggggcaggaggaagattgcaggggcgggaagaaactatttattggtgctcctgtgataccgaattaaatacggaggaaaaaaaaaaaaaaaaaaaaaaaaaaaa

SEQ ID NO: 8363 - DNA, 1135 bp, Homo sapiens
gacaacgaagaggcagaaggatctgggcctgtgcgcgacgccccgggggacgaggctcatggagaagtttcgggcggtgctggacctgcacgtcaagcaccacagcgccttgggctacggcctggtgaccctgctgacggcgggcggggagcgcatcttctccgccgtggcattccagtgcccgtgcagcgccgcctggaacctgccctacggcctggtcttcttgctggtgccggcgctcgcgctcttcctcctgggctacgtgctgagcgcacgcacgtggcgcctgctcaccggatgctgctccagcgcccgcgcgagttgcggatcggcgctgcgcggctccctggtgtgcacgcaaatcagcgcggccgccgcgctcgcgcccctcacctgggtggccgtggcgctgctcgggggcgccttttacgagtgcgcggccaccgggagcgcggccttcgcgcagcgcctgtgcctcggccgcaaccgcagctgcgccgcggagctgccgctggtgccgtgcaaccaggccaaggcgtcggacgtgcaggacctcctgaaggatctgaaggctcagtcgcaggtgttgggctggatcttgatagcagttgttatcatcattcttctgatttttacatctgtcacccgatgcctatctccagttagttttctgcagctgaaattctggaaaatctatttggaacaggagcagcagatccttaaaagtaaagccacagagcatgcaactgaattggcaaaagagaatattaaatgtttctttgagggctcgcatccaaaagaatataacactccaagcatgaaagagtggcagcaaatttcatcactgtatactttcaatccgaagggccagtactacagcatgttgcacaaatatgtcaacagaaaagagaagactcacagtatcaggtctactgaaggagatacggtgattcctgttcttggctttgtagattcatctggtataaacagcactcctgagttatgaccttttgaatgagtagaaaaaaaaattgttttgaattattgctttattaaaaaataaacattggtaaaaaaaaaaaaaaaaaaaaaaaaaggaccgcttcgagctcacttggcctcgcccttatagtgg

SEQ ID NO: 8364 - DNA, 1374 bp, Homo sapiens
  misc_feature (1171)..(1367): n is a, c, g, or t
gcggccgcgccccccgcccatggctctcgtgcccagcgcccgctacgtgagcgccccaggccggcgcacccgcagcccttcagctcctggaacgactacctggggctcgccacgctcatcaccaaagcggtggacggcgagccgcgcttcggctgcgcccgcggtgggaacggcggcggcggctccccgccctcctcctcctcgtcgcaccatctcgcccccgccgtggggaggcgtgcggctcagcggtcggctcgacatgggacgtcgtcctggtggtttttgaaaagcagccgaccgtgtggagtacttccgtgctgaacgattgggactagacgctgaaatccccatttgtcttcagtttctagtttgcacatccagaacggcgaaggctgggtgtgtattccactaactgaaatatggcaacttagaggcgctgtttatttactgtatacgtcgacctattttagatgcgcatcagtatgaaattgtctcaatcttggatgtttcattttatgaatggaggcactttactaggtctagaatatttttttaaaagcctctgaactgagcttaaaactggcgattttatgaaatgtcggcaaaatgactattttattgtttgaagcgagttaatattctcagttgtctttaaaaatcagttactctaattccaggtgaagcaagccgctggtagcatcacccttatgagaagtgaaggttttgtaaactttccagtattaatttgggcgggtattccccgcttgtggcttgtttctgtcctagctggaggtgtaaaatgcacaatgtgtagcaggtagaatacagctccttatcgttctatgtaccaggtattttattactgaactagcaactagccttttccacctttaaaagttgtgccaagtcataatcatattgtgtataacttggaaatggtgctgtttaaaaaaattgtgtatttatacagtaacagtatgaattcattaatctcacctgtaaaaaaaaaacttggccttttctctacacactcaccctcttccagttctttaaaaacgtttatgatattagatccaaagggaggaagggaagacagcagtattaattcaccctagattactcaatttcagggttcctagtggaggaaagccccattccagctgttgcctgnnnnnnnnnnnnnnnnnnnnnnnnnnnnnnnnnnnnnnnnnnnnnnnnnnnnnnnnnnnnnnnnnnnnnnnnnnnnnnnnnnnnnnnnnnnnnnnnnnnnnnnnnnnnnnnnnnnnnnnnnnnnnnnnnnnnnnnnnnnnnnnnnnnnnnnnnnnnnnnnnnnnnnnnnnnnnnnnnnnnnnnnnnnnnnnnnnnnnggactcc

SEQ ID NO: 8365 - DNA, 692 bp, Homo sapiens
cgtttttttttttttttttttttttttttttttttttttttttttttatttatccagatttatcaaaagtttattaaatagaatacaatggcaaaattcaaggcttttaacaattgagtggtaaagttcaagtggaagaaagcaaaactcagaggagtaagagaagaaaagaacaatattttgcctatgccatttaattcccacaaatttgcaaagtgagcattgttattctcagtttccagatgaatgcactgaaataatttggatatttatcctctccaaatttcatgttgaaatttggaggtggggtctggtgggaggtgttttggtttactcagccaaagaatttagcttctttgatttgaagctgagatttgaacccagggtcctttgattccaagcccagatatttaccacaatatctctgtgatcatccaatttatatgtctcaagtatctgtgccattgacaaattgtaaaactgtgcatgtatacattatacctcctaaggttgagacatagatggaagtgcccagcaaaacgtctggcacaaaggcattattttttgttttggctttgggctaaaaaaacatagataacaagcaaatgctttggagccctttaagaagtcttatcttgcttttaaacacctataataatctttggcaatgacattctgcttattattatttt

SEQ ID NO: 8366 - DNA, 2774 bp, Homo sapiens
gcggagcgtaggcacgaggctggagcgggcggcaaggcgaggcgaaagctgcacagggccctacgcggccgcctcagcatgtcggacttcgacgagttcgagcggcagctcaacgagaataaacaagagcgggacaaggagaaccggcatcggaagcgcagccacagccgctctcggagccgggaccgcaaacgccggagccggagccgcgaccggcgcaaccgggaccagcggagcgcctcccgggacaggcgacgacgcagcaaacctttgaccagaggcgctaaagaggagcacggtggactgattcgttccccccgccacgagaagaagaagaaggtccgtaaatactgggacgtgccacccccaggctttgagcacatcaccccaatgcagtacaaggccatgcaagctgcgggtcagattccagccactgctcttctccccaccatgacccctgacggtctggctgtgaccccaacgccggtgcccgtggtcgggagccagatgaccagacaagcccggcgcctctacgtgggcaacatcccctttggcatcactgaggaggccatgatggatttcttcaacgcccagatgcgcctgggggggctgacccaggcccctggcaacccagtgttggctgtgcagattaaccaggacaagaattttgcctttttggagttccgctcagtggacgagactacccaggctatggcctttgatggcatcatcttccagggccagtcactaaagatccgcaggcctcacgactaccagccgcttcctggcatgtcagagaacccctccgtctatgtgcctggggttgtgtccactgtggtccccgactctgcccacaagctgttcatcgggggcttacccaactacctgaacgatgaccaggtcaaagagctgctgacatcctttgggcccctcaaggccttcaacctggtcaaggacagtgccacggggctctccaagggctacgccttctgtgagtacgtggacatcaacgtcacggatcaggccattgcggggctgaacggcatgcagctgggggataagaagctgctggtccagagggcgagtgtgggagccaagaatgccacgctggtgagccccccgagcaccatcaatcagacgcctgtgaccctgcaagtgccgggcttgatgagctcccaggtgcagatgggcggccacccgactgaggtcctgtgcctcatgaacatggtgctgcctgaggagctgctggacgacgaggagtatgaggagatcgtggaggatgtgcgggacgagtgcagcaagtacgggcttgtcaagtccatcgagatcccccggcctgtggacggcgtcgaggtgcccggctgcggaaagatctttgtggagttcacctctgtgtttgactgccagaaagccatgcagggcctgacgggccgcaagttcgccaacagagtggttgtcacaaaatactgtgaccccgactcttatcaccgccgggacttctggtagaggcggctgggggagggtgggggcagggctggctgggggcttctccccactcccgcccccccccttatccccctctgaagacgatgggcagaggagtgacagccgcagacacacgacagccggcagcaactggaatggcagcaattaagggtggggagcgggggttggggggttggggggttagggcagggaggggactggggaagtgcgcacacagccccacacagacaacacgcacccacacagacacagagggaaggggttgggatggggacagggtgcacagcagggcggggtaggaccccagcccctcccaaaacagcctctccttctcccatagacccctttcttctccccttccccacggtaggaacatagcgtgttatgttgggatggccaaagtattttgaattttgttgtccggccctcagtgccctgccctctcccttaccaggaccacagctctgttccttcggcctctggtcctctctggtcccctcctgggtttcttacgtagttgatttttcctctttagtctcccccgacctgcgcccagccccgtggcccctgcccctctcctactctctgtggcagtttcatatttgctaagacgaatttgctcattaaacattttgttgtattttactttaaaaaaaaaaaaaaaaaacaaagaaaaaaaaaaccaaaaaaaaaccacaccaaagaaacaagcgaaaaacagaacacccgaagaacaaacagacacaaaaacaaaaacaaagaaaggggggcggctccgcaaaaagaagaccaccgcccgaggagcgacccacacacagcacccacagcacacacgaccctcaccacaaacaaagagagggcgccacaaaaaaaagaaacacaatacaacaaaaacacaaagaagagcgaccacagcaaaaacaacacagcggaaacaaaaaacaaacacaaacgaagaaaaactactaggagacaacacaaaccacacaacccacggcgggcaggacggaccaacaaaaacagcggccccgaccaccccaccaaacacacacaaaacacgaacatcacaacccgcaagcagacagagagaaacacacaaagcaaagacgcaacagccgacgaccaagacccagaagcgaagagagacaccacaaacaccccaccaaatacaccacccccccacccccacagcacagaccacccacccgccgacccacaccaagcgacagacaaacagaaccaaacgaagcagaatccaatcaccgggg

SEQ ID NO: 8367 - DNA, 818 bp, Homo sapiens
tccttttgttacacatcctagcatcttgctcctctgatactcagaaaattgcaaatggagcagtaacggtcaccctcatgagcccagtcccatgacccggtcaggggagaccccagttttctactggggttgcctgtttggctttccttacttatcgcctgacccctggtctccttattttttgggataggaattatctgtatgaccgttcgctctggaactccgtctgcctggagccctctgcagctgttgtctggcacgtgtccctcttctccgcccttctgtgcatcagcctgctccagcttctcctggtggtcgttcatgtcatcaacagcctcctgggccttttctgcagcctctgcgagaagtgacaggcagaaccttcacttgcaagcatgggtgttttcatcatcggctgtcttgaatcctttctacaaggagtgggtacgaattataaacaaacttcccctttaggtatccctggagtaataatgacaacaaaattcactgcaggtcggtggaatgatagaatgcattttaaatcacattgtaaacttccaggtgatccatggataggataaataactaagttattataattgtttaggaatttatagtccataaaatatcctccagccagggtctcatttcagcttcttgacaatcccataaagttggccatttgttacacatagagaagttgaggctcacagagggtaacaggcttgctcaagtccaggagcctcaggccccgcgtctatttcctccgactgcggcgcggctgatactgcctgaggcgggtggaagctgtcgcgcgt

SEQ ID NO: 8368 - DNA, 532 bp, Homo sapiens
ttttaatttttaaatgcaatatttaatgctgtcagattacttgaagacaaagttttacagaaatttttaaatttcaaaaaaaaaactgcaatgtaccaataaacacctagaaaataatataattaaaaaatttaaagcatcaaacaacctcaagatctcgtcaggaataatgaacaaggcattttgcgttcacatcggttagcaacttgcatcccagttcacgcgggggagggtgatggtcgatatttctgtgtgtgtgagaatccagcacaattattttgcccgttttcccaagagaaagaagccagggggaggggcagaggatggacggagggggctcggctgcagtacgttttggttcagcgattgtgtttccttgaaacacatttagataaattctgctcgaaatcttaattgctggggaattgggaaacccgtgacctgccctggtctttgtccttcatccatggcctggtccagggtcccaccactggggtcttcccttcctcctccctcctctggaccaaaagtt

SEQ ID NO: 8369 - DNA, 6020 bp, Homo sapiens
  misc_feature (799)..(881): n is a, c, g, or t
  misc_feature (1993)..(2018): n is a, c, g, or t
actcggccggcagcggaccgcagccaccagccgcccgcgccctccagccccgtccgggagtccccggcccgctgcggtgccgtgagtacctccaaccccctgcgccccggaggaggccgaggggcttagccaccagggctcggaagtgggggccgaatccggtgcgagacccaaggagaggggagcagagccggagttggggagactgtggctgaaaactgtgtcttcctggagactaggctggcattttgactttggggttgctgaaaagccaggagtcaaaatgactgagcgctttgactgccaccattgcaacgaatctctctttggcaagaggtacatcctgcgggaggagagcccctactgcgtggtgtgctttgagaccctgttcgccaacacctgcgaggagtgtgggaagcccatcggctgtgactgcaaggtgcaacattagaggaaatcaatcagcactgggactggctggaacaaaatctcctccacaccttgtctgtctttgataataaagatgacattgccagttttgtcaaagggaaggtaaagccgtgtgtctgggtggctgacggatgacacagctgagccattctcctcatcaggtgtgactgtcgttgaagcagcgcacacttctcgggggcctgtgcacctcagtccctcctgcttcctgtcccttgcaccccctgccttcccattgctggctcactgagcagggactgtcatctctgtgtgtcaggctctgatagccgaggagaccagcagcaggctcgccgagcaggaggaggaaccnnnnnnnnnnnnnnnnnnnnnnnnnnnnnnnnnnnnnnnnnnnnnnnnnnnnnnnnnnnnnnnnnnnnnnnnnnnnnnnnnnngtacccgttctactcctgctgctgttggaagggcagggtgccccgccagggctggctgtacctcagcatcaaccacctctgcttctactccttcttcctgggcaaggaacttaaacttgtggttccgtgggttgatatccagaaattagaaagaacgtccaatgtctttctgacggataccatccgaatcaccacgcagaataaggagcgtgacttctccatgttcctgaacctggatgaggtgtttaaggtcatggagcagctggccgacgtgacgctgcgaaggctgctggataatgaggtctttgacctcgaccccgatctgcaggagccgagccagatcaccaagagggacctggaagccagagcacagaatgagttcttccgggctttcttcaggttgccgaggaaggagaagctgcacgcggttgtggactgttcgctctggacgccgttcagtcgctgtcacaccgcggggcggatgttcgcctctgacagctacatctgctttgccagcagagaagatggctgctgtaagatcatcctgccactcagagaggtggtgagcatcgagaagatggaggacacgagcctgctgccgcatcccatcattgtcagtatcagaagcaaggtggccttccagttcattgagctccgggaccgagacagcctggtggaggcgctgcttgcgaggttgaagcaggtccacgccaaccaccccgtgcactacgacacctctgcggatgatgacatggcttcactcgtgtttcattcaacaagcatgtgcagtgaccacagatttggggatcttgaaatgatgtcttctcaaaatagcgaggagagtgagaaagagaagagcccgctgatgcaccccgatgccctggtcaccgccttccagcagtcaggcagccagagccctgactcccgaatgtccagagaacagataaaaataagcctgtggaatgaccactttgtggaatacggcagaaccgtgtgtatgtttcgcacagagaagattcggaagctcgtagccatgggcatccctgaatctttgcgagggagactctggcttctcttctcagatgcggtgacggatcttgcctcacaccctnnnnnnnnnnnnnnnnnnnnnnnnnnggagtccctggggaaatgctgcctggtaaccgaggagatagaacgagacctgcaccgctccctgccagagcaccccgccttccagaacgaaacgggaattgctgctttgaggagagtcttgacggcctatgcccaccggaaccccaagattggatactgccagtccatgaacatcctgacctccgtgctgctgctgtacaccaaggaggaggaagccttctggctgttggttgctgtgtgtgagcggatgctgcccgattacttcaaccaccgagtgatcggggcacaagttgaccagtctgtcttcgaggagctcatcaagggtcatctcccagagctggcagagcacatgaacgacctctcagccctggcgtctgtctctctctcgtggttcctgaccctgttcctcagcatcatgcctctagagagtgcggtgaatgtggtagactgcttcttctatgatggcatcaaagccatcttccagctgggactggctgtgcttgaggccaatgctgaggacctgtgcagcagcaaggatgatggccaggccttgatgatcctcagcaggtttctagatcacattaagaatgaggacagcccagggcccccagttggcagccaccatgcctttttctccgacgaccaggagccctaccctgtgactgatatttcggacctgatccgggattcctatgagaaatttggagaccagtctgtggagcagatcgagcacctacgttacaagcacaggatcagggtcctccaaggccacgaggacaccacaaagcagaacgtgcttcgagtcgttatcccggaagtctcaattcttcctgaagacctagaggagctctacgacttattcaagagagaacatatgatgagctgttactgggagcagcccaggcccatggcctcacgccacgaccccagccggccctatgctgagcagtaccgcatagacgcccggcagtttgcacacctgtttcagctagtctcgccctggacctgcggggcccacacggagatcctcgccgaaaggacgttcaggctcttggatgacaacatggaccagctcatcgagttcaaagcgtttgtgagctgcctcgatattatgtataatggagaaatgaatgagaagattaaactattatacaggcttcatatccctccagcactcactgaaaatgaccgagacagccagtcgccgttgaggaatcctctgttgtcaacatcgagacccctggttttcgggaaacccaatggtgatgcagttgattatcagaaacagctgaagcagatgattaaggatttagccaaagaaaaagataaaactgagaaagaattgcccaaaatgagccagagagaatttatccagttctgtaaaactctgtacagtatgttccatgaagatccagaagaaaatgatttgtatcaagccatcgccacagtcaccacactgctgctgcagatcggggaggtggggcagcgaggcagcagctctggaagctgctcccaggagtgtggggaggagctgcgggcttcagctccttctcctgaggactcggtttttgcagacactgggaagacgccccaggactcccaggcacttccagaggcggcagaaagggactggactgtctcccttgaacatattttagcttcacttctgactgaacagtcattagtcaacttttttgaaaagccactggacatgaaatccaaacttgaaaatgccaagatcaatcagtacaatctcaaaacttttgaaatgagccaccaatcacaatctgaacttaagctgagtaacttgtagcaagacagcagctgctatgcacactggagtccaccataccaaagcacgaaccagactgtttcttggggtcagccctaaaccgagatttcagtctaccttaccaatggggcatctggctaaacaacctgacaaactgtggccaggggaaccgacacaaccctcaagcatttctatgtattgagaattgtcagtgccctaaggtatccattggttcccttgatgccaacttacaatttttaccggatttgctaaaatgggcacttctgctgtgatgctagtgttgattttgctctcagatgaacacaatgtctcatactaaccaagaagcaagaaaagccccatgctttcatttttcacttggagtgacaatgggagaggtcaggaatcaagttcactttcaagatctaagggagtccactatctgtgcaattgtatttggcttttttttgcactgtttcaatgctggtaattgaaaccattttaatatatttggttgtattcactttatatgtccttccaaaaatgttgttgtgtacataccatgctttcaatgttggcttccaagttttttaataagaaactttttgttttttattggtcctgtttcttttaccttgtagttaagtgtcttaagctgtagactgtggcagtgaatgggtaagctggagatgttgctgctgcccatccatggtttttgggtggtgcaacactactaggtacttctcagccctgccttgggtcgtgccctacggcttcagagacctctttatggcagcatttaacatacagcttgtaaatgctggtgaaacataatctcagcaacactgctttaggactgaactattaatacaatttttgttattgataccttaaggaactttttacttctgaaccttgactccaggtaccacggggccattacaaaaggcttaaaatatgaatctggttatctcaccaaaaatcaattaattattttagaagacaacaactatactcaatatggatgtaggcagaagcttaaaagacctactgccacattaatttcattacctttaagatgctacagatagatagatagatagtatatcattttaaagttgtttcctaaaatgttaagatgtcaatggcaactggattctacatcctggtttctggaaaaatgcttatcttagaattagcaaaacatacaagtagaataattaacaatatgccttcagtatcccaactacccagaacagtggttctaaaactaggttgcagtttgaaatcactttaaaaccccaggggatggggagaaggcagcacaggccatcaatttgggaaaagctcttcaaatgatcccataattaggatagggtatacaagtacattatgttgcaacttttttttttttttttttgaaggcaattttataactttatttgatctgacgatcagcgattagttctcatccacattgactgtctgtagatctgtaaaggaagtaacagtcaatttccatacccacatcacatttcatatttcaactctaaaaaccttttgtagacgggtctggacattctattttccacaacctttttacatcccagatatggatcagttttgcattctttagcatcttcccacaccaacaatttaaaaagggtacaatgacgtgtgtcacccctagcttaacagatgaattcacattttaagaggtaaggacatttttctaatgaatttaaatggctttatgggatggagaacttacttttgaaagtggtaacaggtacataggtaaccaaagtatatagcttatttggtgaatcttcatcctcattacgttttctggacagccgcacaccggatcggtatggcacattcctaatatgggctcttgcagggttaagtgaagctggtgtcattgcaaaagttcaccttcgaatacagataactttagcaccttattcctttggcccagacagctttgttgagcctggtgtcaatgcgcacatctggagttcccatctccttcatggcaaatttccgaatctctttgagtgcccgaggtgcacgcttcttgaagcccactccatggatgcgcttgtgaatgttgatggtgtattctcgggttaccacttcgttgatggcagaacggccctttttcttctcgccacccttctttgcgggagccattctgccctcgtgcc

SEQ ID NO: 8370 - DNA, 6020 bp, Homo sapiens; identical to SEQ ID NO: 8369
  misc_feature (799)..(881): n is a, c, g, or t
  misc_feature (1993)..(2018): n is a, c, g, or t

SEQ ID NO: 8371 - DNA, 3099 bp, Homo sapiens
tttcctattaaagcaactctttggtcatggacaaactgaaaagattttttattttttttcattagggtcccggaacaagatttctttgtttttaatctttaaaaaaattaagaagagcagaaaaacagttggtttaattgaagtggaatttaaatctaaatggtccgcctgagctgaagggattgaacccttgccatgagttccagcttctgtggaaagggttgccgccgcctccttgctggctctctgcatccaaaggatcttctccgtcgtcaaacttctttctcatttctggatcagagaggacttctttagcagctgctatatcaatgaactttttctcagcttttttcttttcttcttcattctggaagttatctgggtgccactgcagtgctaattttcggtatgctttaataatttcttgctttttggcatttctttttactcccaagattttaataataatctcgtttctgcgactgtttcaataatctttgtgctttctctagaccttctcgaatctgctgatcattttcattgtgttcctgagcagtttcattaacctggatagctcatcatacatttcctctatcaaataggcctcagctcgatctttcagggcattcacattgtcaggttccatctgtaaaacttcagaacaaaccctaatagcttcaacaggcttctcgtccttagaaaagcagtggcaaatcctctcctttgaacgaactgtatattcagcaatgcttggctctgttttcatgacagattcatatttgctggtagcatctgtgtatctgccatctctgatgagctcttcagctgactcaatcagcttattaagtttctttacttgtttatagtgtgcaaaacaccttttatgatcctggtcaagtttaagacattcccgaacttcactgagggacagttcgtggtctcctagttggtagtacagtgtgcttattttataaaacgcttcagtattatcattcttcaactttgacgcagcttttaagtcacttatagctttcctaggttctccttcttttataaaacattcagctcgaagttcccgtagttctgcatcccaaacacaaacctctaaaatcttatcaaggaaggctatagcagcagtataatctccacttccaaaagcgttaagtgcttgtgaacgcaaacgctgcatttcatcagattttataagttgagactgtgcttccttttcttcattttcacttggattagatttgagcacttttttaaaatcatcttctgcttcatcaagttttccttgtttgagtaataagtgacctctctgtaatcttgctgcagtgaagtccatcttcaattgaatcactttagttaaatcaggaagtgcagcttttgatttgcccatagctaaaaagacagtagccctccgataataagcaatatagttatcagggtcaccatctacggcagcatgaaactgagataaagcatcagctagctgtccagctgcaagtaatttcttgcccaattcaagatgtttctcaacatctgcatttactccacattcagcaccttcgtactgcagatccaccaggactagcaggaaggggaataccgagcccagccggctggtcacggagccgggggccaccatgtccgaggctcgcgagtgaagaggagtcacagggtggatctgtggagggaagaggttacagggggaggagctgatgatagatcccacccagacttaagctgctggtgggtgggtgagctgggaagtaggactgtccagggaagggtggagagatgtagctaggggctggggagggggaggtggaagcgctattgagcatcctccacaccaaggttgatgaaggaagggatcccagcagggtttctgctctggggctggcaggttgcctggtattatgcccaaggccgctctgcctgggggaaagggcagccaggcagaggcccagtgtctggtaggctgctgaatttcctggaaggggtgattggatggaaagaggccagaaaccccagcctgagagactgctgtgcaccccacagtctgactgcacagagccgcctctgttggcaggaggcactgaggctccccttcctgtgtattgagaagcagtgtttgccaatatattttgctttcaattccaagaggagctctgggaaaacctgtggataaaaccaaatgccaaatgttggacgttgtttccttttccttttctctctctgattgttttaattgttctgtggtggttttaatggatttgagaccctggagcggcagctgcctttctgatttccagctgctttttgtgaataatttaaaaagaaaaaaaaaaagaaactttacattttggagacaaacctgtgtgagttttttattggtacaaacgttgtatttaacactaggggttttgtacagttttttgccttttctactagaaaacaatgtaaagtgatttcacaatgtgaagagaaaaaaaaattgccactatgaccaaacgcacagtctgttctgcagcaacaacgggattcaatcaactcagtcgtgattcagccgtagaaatgcttttcctttatcttgtttgagcttttcctttctttcctgttttgatttgcaaaagaaaatgtcttttttgtgtgaacttgtgttgtactctgtagaaaattatggattttactttaatggtttaaaaaaaggcaaggagagcccttgtcgcttttcttacctaatcacagagtttgtgtagtgaatttaaaaagaaaaaaaaattgttataagtttggagcaagggagtatgtgtttcaaaggaatctccttcctttttttgtgtgtttttccttttgtcccaatggggaacctaaatctgttttaattgcacagacacatggacaaaaagtcattttgtatctgccaagtgtggtaccttcctttgtttatttgctattaaactgtttgagaacaaaaaaaaaaaaaaaaccatatcgtcttggcaattaacatcttgactactggttacttatgcatatttctgcagcccgcgtgaatttctcccccagcaaatggatttttttttctaccac

SEQ ID NO: 8372 - DNA, 805 bp, Homo sapiens
tttttttttttttttttttttttctgctcttattttactgtttactattattcttttgaattatatgtgagttacatgagtaattacattttcaattttcaatgcttatggtctcttaaagtcttgccctggccctgatcctatctccattctcagccagggcacttcctgcatgtttctgccctagacagaaaggctctgtgaggacagcaactgtgcctctgctcccagagggaaggctccctgggggtggacctggtgtcctctggttttctctccttaatcttgtaccagaggcaagactcaaccaaatggtgctgcatcctgaccataccctcccttctccggctgcaacactgcctatctctccccagacaaaggtgactgtcgcatcttcaccaggtgcatccaagtggaaggacaaggctttgagtatgtcatctttttccagccaacccagaagaagtcggtctgtcttttccaaccaggctcctacctggaggggcccccagggtaaggtcactggtaggaccttggctgcctcctgggcttggctcagcagggcaggttcagcacccaccaggctggccctggagtctctatctttctctaaggggtgaggaagggagtgtggggcactaggcttcagcctcacaataccaggcctggaaggacacacagggttatctggcctaatccccagtgtgcagatatgggcttctcatcaaagtctcaaaattttctggacaaaagacctgagaggccactttgagaagaatgtggtacacttggaagagggcaagat

SEQ ID NO: 8373 - DNA, 1594 bp, Homo sapiens
agcgagtgggtggagttgcccttggaggcggcaccggacctgggccccgtaggcccgccgcgccctgtcgggcctgagccgagtggccccacagagccggcgcgctcccgcctgcagggggagagcagacggggcgcggggaccggccaggccgcggcgggtgctggcacgaggcgcgcgcgctcgcgcaccacgcgccccgcgcggcccgcccggatcgtggcctctcgagagcaagacatgggaaagcggaaccaccaaaaggagtgatgatcaacgatctcatgataaatctggatgctagttctcatgcctcaggacatcctactgggaacgacacaccagctcctgggatcagactttcatctacttaggacccctctttgcccagactactaaagccagtcttcactagccacgaatggctacccaaaggaaacacttggtgaaagattttaatccttacattacctgctatatctgtaaagggtatctgatcaagccaacaacagtgacggaatgcctccatacatctgcagaatcctactggatgtccacttggatgtcctgaagccacctgaaactcagcatatctacgaatgatcaaatgggatgccagcactcagttatccaagcaagaaatatgctccatgcttgactctttaccctcactaacaaaactgggcaaagtcctgctggtctctctctttaatacttctcaaatctgtccctttagtttcatccctctgttactgttctcattcagattcttattacatctcaccaaagccactgcagcacattcttaactgtgtccaagtggtaataattaaaaacagcttactgtctttatcattatcactcttaacccaccctaaaatttcctaaaggtatcccgttgacctcaggatacattaaagctacttagtggtgactggtttctgcctaccacttcctcccctaccacctaacactcacacatacaaatacttggttcaactgtttgctctccttgaaatgaatgcctcctctgtgcccagctagcagttacccatcctttaaaactcatcccctctaagatgtgccctaccacctgcagatttgggttaagtgtctcaataaaatcttaaatgaataaatgcatggctaataagttaaaaaaaaaaaaaaaaaaaaattcaaagattcaaatgcagtgataggtaacttgaaacatgtaggcattgttggttaggaattacaaatttaggaaaactgtctcctaggatctacataggcatctttggggtcttagggagagggagagactctggactggggactagaaattgatggccctagattaagggatgttctgtctctttcaccaggtgaccctggtggaaagagaaactttaaagctgcttagaatgtatctgctgggtggtattaggttgttgatttaaaacaaaagacttttttcttaaacttaggacaaaggggctatgttccagcagctcaaatgtgaccaatacagtgtattggttcttaacccttttgtggtcagaggcccctctaagaatctagtgattctttcctcaaaaaaaaaaaaaaa

SEQ ID NO: 8374 - DNA, 2094 bp, Homo sapiens
ggagccctggcgggcacttcctaccgtacgaggcgcaggtgggagacttccgccctcgcgggactggctagggcgtttgaccgccggcggtgaaggggaggcggtgggcgtcttggagaacagagcgagatggagaagcgaggccgaggcgtgaagtcgagccccatccagaccccgaaccagacccctcagcaggctccggtgacgcctaggaaagaaaggaggcctagcatgttcgagaaggaggcagtgagtgcggagactgctaggggcccgagacggctatgtccgaccgtttaagtgaaatcgctccccagtgggccccgctcccgtcaccacccccagagccaaggaggcagcatctcccttttgtgtttcttttttccccagatgcgaaattgaagcctgagactgagttgggcagtcccctttggacttgagtgctaaagttttcttgttttttaattagggccatagaaccctacataagtcgattggaagggtggttacaagatcttcttttcaaatttactcagcttgcggatttcctgagagtactctgagtattattgctttgtactaaaacacagtatgttagtgtatttagtgccattataagcagttttgctagcgaaaaatgagtgtgttgtattaaaaaaataatttgataaaccaggcagaatagtgccatgttttgggtttttgaaacatcagcagtctggatatttgaagaatgtacaggagaaaaaaacttaagttgaaaataccctgtccaaaacttactgatattgatggaaagggtcattattcagttttattggtggtataacaggtatttctatatgattaggctttgaaaaccgttaatgtattaaagactctatattttattgatactttaacagaaaattagtttgcccaaggatacaaagctgtaatgatagagctgggaccagaacctgtatgctagtactcggtccaattggcctatactggtttctcttcgtacttacttcgtggacctataataggatgaagatagagatgacaggcaaaacaattttttgaagaccctaaaacattttaagattactcttaaaaagagaattctcaaaataatggcgaaatttcaggttcttgtttccctggtgtctacattttacagaggaaagaacgaactaaataaaggaggaaaagcaaacaggccaagtttacacagctaagaaaaagagcagagcagggctagaaacctaaatcagttggacttaaaacttcacactcccaaacactatgctgtatttcttggcaatgagtctgagcaacaggtcaccaacagtaaagaaaaatttctatatattgaggcagacaagggtggcttttataaacttactgcctatctgaggtctgaagtggtctttaaaattcaatgagcctgaactcaaaatgaggagacacataggtgcacctggtatataggttaaaatctgggagtgaggggacatggaccaaagtaattattagtatttgatatggatgtgatcaattatagctatctttaaagttgattcttttagaggtgagaaatttgaatagaacaataattgggaagaaattgagaaaggactctacaaatgctcactaaatgtacctgaggaaactgttcacttagttatttctaatttaaggtagctgttaatttccctattttggagcataggaaaatttaagacatactgtttcatcaatatgaccatctcttgattttatctgtcttgcctccatttctttttttctagtggtagcacctcagttaacttttagagaattaactcatctgcaattgtatagagctttggtgagattgtcagctacttcccttaactttttaataaggatgagacccaaactaagctaattagatgaattctttgaaataatgcaaagaaaatgattgaggtttattcacattgaagatgagaagctaaagtgttccctgtgtctttctgaatctggttcatcagccttctctgctgttatgtaaactgtatctttccaataaattatactttggcttaaaaaaaaaaaaaaaaaaaa

SEQ ID NO: 8375 - DNA, 910 bp, Homo sapiens
ctgtctccatggatctgcctatatggactgatcatttcttggtatcctaaattgtttttgcagcctgtttttcttaacctactcctgcactcctgtttttacccaaagcattgcagaacaaagctggcattgggatgcagttgacaagatttactgaacgcttgatgccacctactataagggcatctcaatgtagaaaaggaaaacgtgaaagctaatgtcagaagtccctgcttggagtttctcggtcctccctccttgggcccttcctgctgctgtgtgactgggccctctgtaaatcagaacagattcttttttcataattactcttactctagactcaaggacccagttcttcatcttctcaagaagaaaccagaaaggctaaacagtgttctctaaaactaaagaacagacactctccaacataattctttgtcacttcccagaatgtggaaaagtcattgttattaaaacatcaccccttttccgtcccactatgcaaaactcatatgctgagtggagacttaccctggaaaatgttacaaccaatgcaaagttggttgtctgcccatttgtcaccgcccccaaccctccacccaccaattcttccttgcactcagaactccagatttattcaggtacaagcagcaatgggaagcggaagggaaggaacatggacaacatccgtatcacttgtttaaaactgctcgttgatgaaaagttttggaaataggtagtagtgatggttgtacagcattgtagatgtaattactgccactgaattgtacacttaaaaatggttaaaatgacaaaatttgtgttacatatattttaccacagttaaaaatattaataatgtaatactaaaatctgttgacttgtacactttaaatggatgaattgtatg

SEQ ID NO: 8376 - DNA, 447 bp, Homo sapiens
tgcggccgcccacggccccgcgcccacgtcacgcgcccgcctcgcatacctacataaggcagccggggcgactggcgcggcgaggcccccgatgaacagggcgggctggacggggctaagagcggcacttggtgttcgggagaggctagtccgaaccgcgctccctcccctccagagggctccgtggaaaacgcgcgagccagctggcggcgtgtgcacgtggtgctgggcttgggaatattcacagtctccctagttagtaaaagggacaggcggggcgtatgtcctttccaagacaaatgcaaagcaccagtgacggatttcatgctatgtgtccgacattgagctttcaagtataactcctaaaaaaccagaactgtgaaccacgctagacctaaattccccattctcaggagactgacggaaaccaagtgacaaagtgtcctt

SEQ ID NO: 8377 - DNA, 1185 bp, Homo sapiens
gggcgctgcgggggctgacatgtcgtcccggcctgggcgcgaggacgtgggggctgcgggcgcgcggcggccgcgtgagccgccggagcaggagctgcagcgacgtcgggagcagaagcggcggcgacacgacgcgcagcagctgcagcagctcaagcacctggagtccttttacgaaaaacctcctcctgggcttatcaaggaagatgagactaagccagaagattgcataccagatgtaccaggcaatgaacacgccagggaatttctggctcatgcaccaactaaaggactttggatgccactggggaaagaagtcaaagttatgcagtgttggcgttgcaaacgctatggtcaccgaacgggtgacaaagaatgccctttctttatcaaaggcaaccaaaagttagagcagttcagagtggcacatgaagatcccatgtatgacatcatacgagacaataaacgacatgaaaaggacgtaaggatacagcagttaaaacagttactggaggattctacctcagatgaagataggagcagctccagttcctctgaaggtaaagagaaacacaagaaaaagaagaagaaagaaaagcataagaaaaggaagaaagaaaagaaaaagaagaaaaaacggaagcacaaatcttccaagtcaaatgagggttctgactcagagtgacaaggatgtgacttgttcaacattctcttctcaaacactgaccaaggaacagaggaagatgcagtcagagaaagcagcaggatagagacgccgagagaggagtatatgtgggtcacagcagtgagctcccacccgccttgcagtgaagatgtgaccccaggagagggagtgtctccttccaggtgctagctctggacagcagctgattttaggcaggaaagtttcttcatcgttgtcctccctgctggtcacatgagtttacgattcctttgaagtgtctcccacagggtggcaggactgggagaatctctgaggcgtgtcttccaggccctcccacagcttgtgccctccacagtgtggactcaggtcccatagacatcaggctggagtcttctctgttgttgagaataataaaagctcattatttattttttaaaaaaaaaaaaaaaaaaaaaaaaaaaaaaaaaaaaaaaaaaaaaaaaaaaaaaaaaaaaaaaaaa

SEQ ID NO: 8378 - DNA, 589 bp, Homo sapiens
  misc_feature (563)..(563): n is a, c, g, or t
cggccgcgccggcgggggcagcgccggccgccgattagttttatctcggaacgtcaattgacttagactgattggcttcctgccgccaatgtcaattaaattgcaaatgcttggcggaggccggcgcgagcgggcggcctccttcccgggggcgccgcgctcagccttctctttgcgccacgttcggccgcagctgaattcatttctccttccacgtcgcgcaggaaatccaggtgacctcctggaagtcgtctgccctccgcccccggccctggggactcctccgtcggagcccgagccccgaggacccccggccggtgggcgggagctaggcccacggggcgcccggaccgcggggccgaggaggaagggaccggcctccccgcagggacctcggcctctctgccgagctgtattctcacggtggctccgcggatccctggacctccttcaaagatcttgggatatgactcggtgcgcccttgagcgactcgcttcctgctcctctcatgcctggctttcttcaccggccacgagtaggctcgaaggagatggtggccggngtcccgtccagcccatgcccagtgcc

SEQ ID NO: 8379 - DNA, 715 bp, Homo sapiens
  misc_feature (167)..(183): n is a, c, g, or t
  misc_feature (569)..(618): n is a, c, g, or t
aggttacaaaactaacacacctaatggtgaaattggcgaacacctacaagctccaacggaaaagttccggtggggggtggtgggggggcggacgccaggttttctacctacattaactgcttgactcaagaattatgagagcagctaattgctcttattacttcctnnnnnnnnnnnnnnnnnccctcttccctccactggttcccactcaatctccggttcatccttatagtcccatcgcacacgctgcctccaaatggcttttctgacctcttgttccctccacggcaaccgagacacatccagtcaaaacttagtcccctcccccgactctttggggcttccctttaacagtagtgttctgaaaggagcctgagctttagaacctcggttagggacaatgccagactacactaactttctagcgttaatgacaagttacctatcctccctgagcctacctggaatttttggaagggttgttaatatatgtgactgccctgacatattaaaacgtcctgaataatgtcagctttatttctccttggacttcctttaagtaccctgcnnnnnnnnnnnnnnnnnnnnnnnnnnnnnnnnnnnnnnnnnnnnnnnnnntccttgatgacagagactcatcataagtcttgctcatcttggctttactaaaatgaccagcacagagctctgcactcaataaacgctttttggattg

SEQ ID NO: 8380 - DNA, 1039 bp, Homo sapiens
tgcgcggggcacccagttaaggcctgcactaatattgtgaaattccaacggccacggattttcctccgcattttcaacttcggtctcaagcagggtctcaagacttcttccccagtttccattcctccagcttaactctggcttgcagtaaaatactaaatttccagttccttctgagattcccaaatgccaagtttcccctccctaatgtcacattatcaactatttgtccttgtaaatgtacactttagtgtacattttaggtaccatattttaattaatcattttttgacaaagcattggctggcattttaaaaaagatttgttttctgtttgtaaagatttcccatgagaagaaaccaaagaataatcccctgacactgtattgtaaaaaatcttctgtgccttttttttttttttaaatcttccctaggcacagagatcttatcagaatatttttgggtcaaggtttccctttggaaactttataaggtaatgtgtcctcagccacccttcagttttttccttggtcctgggtttcagtactgtctggggataaatcaagatatccactgtggctgtgtatgctagaatctctagtaaatttcagctcctggcctggaatgaactcttggcatatctgggaatgggagacagaggacaacctgaggttggagtgtagcctctcaagggagcaggtggatgccctggggctgagaggaatctcctggtgtactcttcctttgaaaagcaaaccctttgagaagttaagattgtcttcaagcaacccgggttccatttctcgaagacacattgctggtcagccaatcagatgctggtattgaggggagaacacagaaataatttctgcccactggattctctaagatttgtgaaagaaatgatagtatcccaaaagacaactcaacctaccccagtgagatgtcatagacttgcaaggtgaatgtactgggcagtcactgaggcatagtgcagcgtcttcagagaggatgtcttcagagaggtatgctctgataag

SEQ ID NO: 8381 - DNA, 1276 bp, Homo sapiens
  misc_feature (1183)..(1212): n is a, c, g, or t
ggaagcgcggggcgggccggacaatgagagtgtccgcctcctgagccaataaagctgtactggttttgaatcgcggcgcgtttcccgccgctggggtcaggggtcgaggttcgggtcgtggggcggagggaagagcgggcgggcgggaggcgccggcgccagacgcggagggaaggagctacgagtagccgccgagaggccgcggagccagcgacgaccgacccagccgagccgccgccgccgccgcgcccccatggcggccgccaaggacactcatgaggaccatgatacttccactgagaatacagacgagtccaaccatgaccctcagtttgagccaatagtttctcttcctgagcaagaaattaaaacactggaagaagatgaagaggaactttttaaaatgcgggcaaaactgttccgatttgcctctgagaacgatctcccagaatggaaggagcgaggcactggtgacgtcaagctcctgaagcacaaggagaaaggggccatccgcctcctcatgcggagggacaagaccctgaagatctgtgccaaccactacatcacgccgatgatggagctgaagcccaacgcaggtagcgaccgtgcctgggtctggaacacccacgctgacttcgccgacgagtgccccaagccagagctgctggccatccgcttcctgaatgctgagaatgcacagaaattcaaaacaaagtttgaagaatgcaggaaagagatcgaagagagagaaaagaaagcaggatcaggcaaaaatgatcatgccgaaaaagtggcggaaaagctagaagctctctcggtgaaggaggagaccaaggaggatgctgaggagaagcaataaatcgtcttattttattttcttttcctctctttcctttcctttttttaaaaaattttaccctgcccctctttttcggtttgtttttattctttcatttttacaagggacgttatataaagaactgaactcaacattcaggttgttttatatattttgtttctaagtttttgccctattgaagatgacttcagaaaatccattccccagtcatgaaaatgtactgtgctaactttcttttccctagtggaaacacttatttatagtcatcaaaaatagtgaataaaaacacattttggaacctgggaaaaaaaaaaaaaaaaaggnnnnnnnnnnnnnnnnnnnnnnnnnnnnnnggcccccagctttacgcgctaccccaacctttctttggtaccaaagggggtccccaaatagagg

SEQ ID NO: 8382 - DNA, 3232 bp, Homo sapiens
  misc_feature (448)..(462): n is a, c, g, or t
  misc_feature (514)..(522): n is a, c, g, or t
  misc_feature (656)..(698): n is a, c, g, or t
  misc_feature (700)..(709): n is a, c, g, or t
  misc_feature (711)..(713): n is a, c, g, or t
cccgggagagggagctctcgggtcggggctagggaaggctgaccccgctcggcccgggtgaaagggcggtgacggcactgggtggggccgagctccagggctggctgctgggctgctaagggaactgtgagccgctcagagccgcgcgcctcccgggcggggcggggccggccgtgggagtccgcgcgtgcccgcgccgagctgcctgctccggcggcttcgctgctagctcgcggcgacgtcgggccgattttcccaggatgacagagctgaggcagagggtggcccatgagccggttgcgccacccgaggacaaggagtcagagtcagaagcaaaggtagatggagagactgcatcggacagtgagagccgggcagaatccgcacccctgccagtctctgcagatgataccccggaggtcctcaatagggccctttccaacttgtnnnnnnnnnnnnnnnactggtgggtgagaggcatcctgactttggccatgattgcatttttcttcannnnnnnnnacagaggggagcaatggtttggatgattatcgtgatttgcgtcagatgtaagtagttaccatgacaataaatactattggatacaatcgtctaccaatcatatgatctgccctggttcaggacgctcagctggnnnnnnnnnnnnnnnnnnnnnnnnnnnnnnnnnnnnnnnnnnntnnnnnnnnnntnnncttcaccctggtccagagagaagagcctttgcggattctcagtaaataccaccggttcatttcctttactctctatctaataggattctgcatgtttgtactgagtctggtcaagaagcattatcgactgcagttctacatgtttggctggacccatgtgacattgctgattgttgtaacacagtcacatcttgttatccacaacctatttgaaggaatgatctggttcattgtccccatatcttgtgtgatctgtaatgacatcatggcctatatgtttggctttttctttggtcggaccccactcatcaagctgtccccgaagaagacctgggaaggcttcattgggggcttctttgctactgtggtgtttggccttctgctgtcctatgtgatgtccgggtacagatgctttgtctgccctgtggagtacaacaatgacaccaacagcttcactgtggactgtgagccctcggacctgtttcgcctgcaggagtacaacattcctggggtgatccagtcagtcattggctggaaaacggtccggatgtaccccttccagattcacagcatcgctctctccacctttgcctcgctcattggcccctttggaggattcttcgcaagtggattcaaacgagcctttaaaatcaaagactttgccaataccattcctggccatggaggcatcatggatcgctttgactgccagtatctgatggccacctttgtcaatgtatacatcgccagttttatcagaggccctaacccaagcaaactgattcagcagttcctgactttacggccagatcagcagctccacatcttcaacacgctgcggtctcatctgatcgacaaagggatgctgacatccaccacagaggacgagtaggggccacccagggccaggagaacaggaacagaactgagcaggggcaggtctccaaggcaagcccagctggtgtgacttagacaatgacgaggcttcaactcactgtcttttttttttttttttggagggtattttttatttgtgggttcaaaaaatctgtatatacagtctatgtgtttagaatttgtgttgtaagtaaactacagctttgagttggaaagaagtcacgggttgtaaaaccatttggatttttttaaaacaaaagtattaataatctggaagacagtgttgcccaggtcaggagtgttttcttggtggttccagcccccatcaattgaactgtttctgggctcagtcagacacagacattcatctgtgtctgaccaaatcaggggacttccccacctgtggtgggaggcacagcttagatgttttgtacacctggtcttttctagaaatccctgcttggagctgcagaagggttgccttctgtaggtcggaggaatggaggcttactaaccaggtaagccttctatgcatccacaccaaaatcctgcagaatgtaagtaagctctgctttataagatgggttcaccttcatcgcagactgaaagtttcagtttttatttttttcagaaagcacgaaaaattatttataatagtctggagaaaaaacacactgtaatatttcaagtgtatgcagtagaatacggttaactggagccctttcccacatgtctaggctccaatgtctcctgtaggtccacctaactgtgtgttttcagggacaatgccatccatgtttgtgctgtagacttgctgctgctgaatcctttctggggactttctcatcgggcagggagcagagggcttctcgttcatgcaccctttgcctgaacacccatgtagctgctgtgttgtgtatatattactcttaagaggagtgtgtgtgtctgtgtttgttttaaaagtcacttatttcttacagtgatttcaattgcaccatgacttcttcactaaaaccacaaagtcctgcttaaaactatggaaaacctaacctgattagagccttgactattttgaagattaaatgcacactttttatataaaaaaaaaaaaacgtttaaatgtagtttgtattgtactgggggacctttcgttgttgttgtttgcttaaactgtgattttttttcccctccctaatttcaggggtgagattgactttgggaagacagattagttctttgtcaggccaacaagtgatggagtgcgggaaagagaacttggcacccaaatatatctaactattccgtgccgtggatgttttcattgccaacgagggtggtaatgatttgccttctgcaccttgggtctaagtgttggtttgtggtgggtttttggtttgtatattagacctcaactgcactacactgaaagtgcactttccagccgcatggtttctagtagagggcccgccgaaggatggggccccctcgggaagttttcacttccacaatcccttgaagggaccttcccataatggggtggggggggctttaaaaaggttttttttttcccccgtgaaattttattttcccttttcacccccccggggggtttctctcta

SEQ ID NO: 8383 - DNA, 1214 bp, Homo sapiens
ggagaatccaaaacaggaagagactgagctggctggtggcgcaggctacattccatgccccagaaggttgaaggaatctgtgaatctgtgacagaagcttcaacttgagtttatgagagtgtagtgggaggcagatctaccacgggagagtagatttgaagaagtctttttttttttttttttttttttgccttaggaaggagaggagtcagtatgggatggataagagtgaggcagaaggcagagagcctaggtctgtggttagaacaacaggtaaggctggaaagatttagctgagcaggagcatgatggagggtgggaagtcagaatcaaagaaaagggacaactgagtcagcttaggatgttcaagaagttttggtccagaatcagtcttcacctaaaaacgtttcctaagttgaagcatgagaagtagtagcccaggctgttttccattgttaaaaatggctatactgttatgcacaaaggaagtttcctttcctttcctttttcttgtaaagggttccttttaccattggcagttgcactctttggacttcctctttgttgaagttagtgatcagagaacaagatagaccctgctaaccacatttgtccgtgtgttctgcgggggtcgggggggtgggggaacaattttgaagttttcatgtccatctcacacattactttggatttgaagcagtataatatttgcaatcagcttgtatgcactaagaccattgtcctctacagtgggggaaggttaagtgcagagctaaacaacacaggtggtggcttgagtaatggtagatgggtgtctagttgaagaggggtgtgagagaggaagaagataaagaatgtagtaatactgctttgtgaggaaattaaacgtttaaaaatgtgatcctcatgtctttaaattaaatagatattctttttgtgtcttcacattctgaaacatttgtaaatacatagaccattgttcaagattaaatttagtctgatttaattaaatcatacttagatgaaaatatgcccatctatttgacttcatattttggaaagaaacagggtggatgttgacaatttttttatgactatataaattatagttttgcctcaagcaacaaaaaaaagggggggtaaaattccctggggggcaagttaggttacagtttgtaaggggcaagggggtaaaaagaaggcgaaagcgggga

SEQ ID NO: 8384 - DNA, 1358 bp, Homo sapiens; identical to SEQ ID NO: 8067
  misc_feature (741)..(741): n is a, c, g, or t
  misc_feature (797)..(798): n is a, c, g, or t
  misc_feature (935)..(935): n is a, c, g, or t
  misc_feature (1061)..(1061): n is a, c, g, or t
  misc_feature (1297)..(1298): n is a, c, g, or t
  misc_feature (1301)..(1301): n is a, c, g, or t

SEQ ID NO: 8385 - DNA, 559 bp, Homo sapiens
ttgatattaagaaatctgaaaaactttgaataggtagtaaaagatgatgaattcttagagctttacctcagaatgtgtaattttcatgcttttcctttctagaaatctaggaaacctgacatgggacctttggtaaatacattattattcatacattttgatggaatataactaatatgtttattttctctaaaccatagtttcataagtacaagccacacctttgatttacctaccctatcttctttactgatgaagctgaaactactttgtgatgcctattgtcccagatctttctgttaattgcctaacaacaaaccagtttagaaacatcaactggaatcaatttgcatttgaaaattagatcagcacaaagacttgatattgtggaatgactagcaaacaagcaatgtcatctaacgaacaagaaaggctcttgtgttataatggggaagtccttgttttccagttgtctaaaggaaattttgcagataaagagcctacaaaaacacccatattacatgtcagaagaatggtatttgacagaggaacaaaagta

SEQ ID NO: 8386 - DNA, 987 bp, Homo sapiens
  misc_feature (844)..(845): n is a, c, g, or t
atttattgtatcaaagtacattgtacttaacattttaggccatccttttactgttccttgatgctttaatatatattaatttataattatcctgatatttttgtacatttttcaaacttaaaaatcaggatttttttttttttttttttggcaatagtactaacatagggttttatcttgggatacatatgtattggtctgtttgttgaccttgacatctgatcactgatgtcaatgacctactggcctcattcaggacacctgcagagagtatgcaaagtccgagagaggaaaacagaaatctgtatgtgagatggtcattgtacagaaagaagtggcccctctgcaacatgtcctcacagaaacgaaatggtgtgtagcaatcaacactagaaagtagaccttttgcaaattaatatgtccttgaccttttttgcccttttgtgggggtgaggtggggataaaaagactgtcatatcaagaactgtgacttttctttccctcaaacaataaaactcctttattatcttaatgctcccatgttaacatgtttgctgctaaattacaatgtagaattgataatggtttatagtgaactgtgctcttccctcattaaaatcccagggtgccctgtaaagatgcagatgtttcttcctgaaaacttctttttttacaaagaaaattagatgtacatgtataattcagtgtgctttgtctttctccagattaatatcggttacactgctgatgtttgtaaattaaacagatatttacttcaaaaaaaaaaaaaaaaaggcctcttagactaaaatggccaccaggccctttttttttttttttaatnntttttttttttttttttttttttccgaataaacaatttttaattcactttttccatttctttataaagagcttttactagcgctttctccctaaaataggaaagggggtgaagaagttgccccctcaaggaaaaaaggtaac

SEQ ID NO: 8387 - DNA, 563 bp, Homo sapiens
gcggccgcccagccccacactacagcatgctgccagtgaggacaacctgtccagcagcacgggcgaggccccgtcccgggcagtcggacatcatggggacggccccaggccctggctgcgtggccagaagaaaagcctgggcaagaaaagggaggagtcgctggaggcaaagagaaggaagcggaggtcccgatccttcgaggtcaccgggcaagggctctcccaccccaagacacacctcctggggccccatcaggcggagcgcatctcggaccacaggatgccagtgtgcaggcacccagcccctggtatccggcatctgggaaaggtcacgctacctttggccaaagtcaaactccctccaagccagaacacgggcccgggggactcctcacccctggctgttccccccaacccaggtggtggttctcgacgggctacccgtgggccccgcctgccccacggcacaagcacccatggcaaagatggatgctcccggcataactgaggggccctgcctggaactggctctctcacctcccaagactgaatggggtctagca

SEQ ID NO: 8388 - DNA, 643 bp, Homo sapiens
  misc_feature (42)..(82): n is a, c, g, or t
  misc_feature (554)..(554): n is a, c, g, or t
  misc_feature (581)..(581): n is a, c, g, or t
  misc_feature (609)..(609): n is a, c, g, or t
  misc_feature (616)..(616): n is a, c, g, or t
  misc_feature (624)..(624): n is a, c, g, or t
  misc_feature (639)..(639): n is a, c, g, or t
tttttttttttttttttttgagacagggtctcactgttaccnnnnnnnnnnnnnnnnnnnnnnnnnnnnnnnnnnnnnnnnnttgacctcccaggctcaagtgatcctcctgcctcagccttccaagtaactgtgactacaggcacacaccaccacacctaactttttttttttttttaatttttagtggagaacaggccttactatgttgcccagggtgaactcctgttgctcagttcttgaaatcctgagctcaagtgattctccaacctcggcctcccaaagtgctgggattatagacatgagtcactgaacccagccagaataaatattcttaataactaaattcttggctacacttcagtaactttgtttctgatccttcctagggagtgagttaacaaatagggctgtgctggaagggctaggctgatagctgctcagtaaatctcatcacggtatgactcttctgaatctgaagtcgacaggtttaagcaaggggatattttgtaacttaaaatatatttaaataacatctggatggtacatttccngtctttgtgccattcacatatatattnatcctattcggcctatttttattgaggncatgggntgcccggntactctgggaggtcnccgg

SEQ ID NO: 8389 - DNA, 795 bp, Homo sapiens
  misc_feature (549)..(549): n is a, c, g, or t
  misc_feature (590)..(590): n is a, c, g, or t
  misc_feature (661)..(661): n is a, c, g, or t
aaagacagggtttccctctgtgtaatcacaaaggcacagtcacagctgatttgcagcctttacctcctgggctcaagtgaatttcccacctcagcctcctgagtagctggaactacaggtgtacaccaccacatccagctgatttttaattttttgtagagaggagatctcactatgttgcataggcttgtcttgaactgctgtgctcaagcgatcttcctgctttgatctcccaacgtgttgggattacaggcatgagcaccacacctggccctatttgccttttatgaagtcttttaataaagcaataaaaatattgaaatgtttttagaagcttctgcacatcaataggcatccttgaagactaattgaggacccctcatttttaagtgctgtgttgttcattaggaacggtccattgtaattttaagttacaaagattttgccatttctgtaagtagttatttcttctgaggcctaatatttatacattctaccttatagctagaaggtagaatacggtgttcttcagatactcaggatccaatntttccctagaatcctggatttggtcctcagatccccttcancaatttagttaatgatttttccctacctaagggtacaagaaaaagaatgtagaacacaaaaatctctgcanatttctgaagtctgcacccactgtaatattaccatttctgctagtttctgcctgatcctggacatctgcagcctcttaactgaatccaagtcagttaattatcagatccaatccaatcatggatccagtccagt

SEQ ID NO: 8390 - DNA, 1664 bp, Homo sapiens
gttcataacaactccaagcatggacggagagcaagaagactcgatccatcggaagctaccccctgcatcaaagccattagcccgagtgaaggctggaccacaggaggagccatggtcatcatcatcggggacaacttctttgatggtctccaagtggtgtttgggactatgcttgtatggagcgagctaataacccctcatgccatcagagtacagactcctccccggcacatcccaggcgtggtagaggtgacattatcttataaatctaaacagttctgcaaaggagccccaggaaggttcatttacacagcattaaatgaacccaccatagactatggcttccagagactgcagaaggtcatccctaggcatcctggagatcctgagagattagctaaggagatgctgttgaaaagagctgcagatctagtggaagctctttatggcacaccacacaataaccaggacatcattttgaagcgagccgcagacattgctgaagctctctacagcgtccccaggaatcccagccagcttccagccctctctagctccccagcgcacagtggcatgatgggaatcaactcctatggcagccagcttggggtcagcatctcagagtcaacacaaggaaataatcaagggtacatccgcaacacaagcagcatctctccgcggggatactcttccagctccacgcctcaacagtctaattacagtacctccagcaacagtatgaatggctacagcaatgtccccatggccaacttgggtgttccaggttcaccaggatttctaaatggctcacccaccggctctccttatggaatcatgtcattaagtcccaccgttgggtcttccagcacatcctccatcctcccattttcctcttcagtttttcctgctgtcaaacagaagagtgcctttgcccctgtcatcaggccccaaggctccccttcacctgcctgctccagcggcaatggaaatggattcagagccatgaccggacttgttgtacccccgatgtaaagaagaactgctttcttatagcacaaaactacttactctgatggaccaataatgaagaaagcactaggagctcttttgggggtgtagtggtgcccccacatgaacatgatggacacccttgggtctgcaaggagccagcatcttacttggtcccacgtcctcctatagctctgatggtggctacacaaactgaccctcttgggacaaggacaaaagatgtcattgacgtagtcagtgctaagagcagaaatgcaattctttgttatgaacattatgaaaaccaccttcctatgtttgtaaaatatttaagaaaaaattggcaaacaattaatgcttaatattttggatactatttgtttttctttgtaggaaaaaaaagttgaaagtttctattttctatgaagcctttcagataccaatttagtttatgcagaaaaaaattgaacaaaacagggtaccagcacggaagactttcttaaaacgcaacctgaattgaatgatgaaatgttgtatgtgtgtttgcttatagcttaatctctttaaaaaatgaacaaaaaaagggaaaaattttaaaatgttttacaattatttaaataaataaatgtgtaacttattgtaaaaaaaaaaaaaaa

SEQ ID NO: 8391 - DNA, 887 bp, Homo sapiens
tatcataaataaatgaaattttattatatttatgtctgcaaagtctacatagaggttgtttaaattagtagacaatattaaattgttatttctagcctaagtttacatacatgcaattaaaagcaattcgacccttaaaaatctcgatcttttatatgtattcatctttctttaataatcattaagaatcttgtccatatctattaatttcactaacaaatactttttattaactgtcaatagcatggttatacttgtaaggagtctaaaacacatatgtatatacatatatgaatttaaagattaaaaatacatatgtttatatattttaaatcgccatttacatggtaatttaaaaaattcttttctttttctctaattatctgcagtaagcatataatacttttttaactgaaaaaaaaacaacagcctccaaagaatgagagtgactattaaacacttgcaagtgctaaagattcataaaatccaaatattaacaatgttggcctggagctggaaagactgcatgcaacagtgacagcacatggggtttcccagatgtcaggtttaaaaacaaagcagtaataaccttacctagttctagacacaaatctagtcataaaagtaatagtatacgttcttgtaattgagaaaaatgtgttattttataaaacaatttttttccttctttctttgttcctttttaccttccctttttctccttccttccttccttccttccttcctcctctccctaggaggcctgcccccgctaaccggctttttgcgcataatgggccattagcgaagaattcacaaaaaacaatagcctcatcatccccaccagtcagtagccaccagtcacccgtccgtaccgtgtacgtcta

SEQ ID NO: 8392 - DNA, 1056 bp, Homo sapiens
cgaattgtggcattccctcataatgcaaagggttttagaactgatggattaaaggcatccaaagacctagtgaaatcattctcagcttttttttttttttttttcctggcagctccatcatcttggggtttgtatagaactttcccttttactagaagtactgacaggaaaaattttaaaatcataatattgtttatcttcattttgatttggggaacttcttgtgtatttcccaagactgttgtgccctctatgtaggaaaagcattggccaagggtgaaaaaaaaaaaaaaaagtgtgttctaactcccagtgcctgacattgggaaagacacttcctctcttgaggctgcagtttcccaaactgttaaatagagtttctaagctagatgatttcccaggcacccttctaactctgaagtcctataaacctaaatcccagataccgcttttattcaaaggaatagcttgcctgcatttttaacaccgccttactgcacccccagttgaaaagaaaacaagaaaagatgggctaggggatcttgagttgcataaccatcatgctgtaatccttatccatctgtagagatttgtcaatcaacagtgtggctggggtttgctattcatgagagcagctttccttgctgaaaacaagctataaataagaaggaatggtgaaggaaaggaaagagctgaggatgtgaggtaaacagtagaatatttggcttttgaagttgtttatgtaggtagataaatatgcagagataaacagggacaggtacaaacccatagggatgaagagtataaacatcgatttcatcaacaggcacccactggctcagctaaaaataagtgcctcattacaggagcagacacagaaagtcattcactcacacacctcttcctggatgacaatgatttacagacaagttcccggaatatatctcatgaatgtgaaattctgaccctcgcctattacaggctgaaacagacagatgctaagtcaggctgtatgtaactacacagacatgccatcaggtatacaacacacccctg

SEQ ID NO: 8393 - DNA, 824 bp, Homo sapiens; identical to SEQ ID NO: 6919
